(19) United States
(12) Patent Application Publication
(10) Pub. No.: US 2024/0131187 A1
(43) Pub. Date: Apr. 25, 2024

(54) EFFECTOR PROTEINS, EFFECTOR PARTNERS, COMPOSITIONS, SYSTEMS AND METHODS OF USE THEREOF

(71) Applicant: Mammoth Biosciences, Inc., Brisbane, CA (US)

(72) Inventors: Timothy Robert ABBOTT, South San Francisco, CA (US); Aaron DELOUGHERY, San Francisco, CA (US); David PAEZ-ESPINO, Concord, CA (US); Benjamin Julius RAUCH, San Francisco, CA (US)

(21) Appl. No.: 18/469,512

(22) Filed: Sep. 17, 2023

Related U.S. Application Data
(60) Provisional application No. 63/376,419, filed on Sep. 20, 2022.

(51) Int. Cl. A61K 48/00; C12N 9/12; C12N 15/11

(52) U.S. Cl. CPC A61K 48/005; C12N 9/1241; C12N 15/11

(57) ABSTRACT

Provided herein are compositions, systems, and methods comprising effector proteins, effector partners, and uses thereof. These effector proteins may be characterized as CRISPR-associated (Cas) proteins. Various compositions, systems, and methods of the present disclosure may leverage the activities of these effector proteins for the modification, detection, and/or engineering of nucleic acids.

### CROSS-REFERENCE

[0001] This application claims benefit of U.S. Provisional Application No. 63/376,419, filed on Sep. 20, 2022, which is incorporated herein by reference in its entirety.

### INCORPORATION BY REFERENCE OF SEQUENCE LISTING

[0002] The instant application contains a Sequence Listing, which has been submitted via Patent Center. The Sequence Listing titled 203477-764201_SL.xml, which was created on Sep. 18, 2023, and is 1,221,105 bytes in size, is hereby incorporated by reference in its entirety.

### FIELD

[0003] The present disclosure relates generally to polypeptides, such as effector proteins and/or effector partners, compositions of such polypeptides and guide nucleic acids, systems and methods of using such polypeptides and compositions, including detecting and modifying target nucleic acids.

### BACKGROUND

[0004] Clustered Regularly Interspaced Short Palindromic Repeats (CRISPR) and associated proteins (Cas proteins), sometimes referred to as a CRISPR/Cas system, were first identified in certain bacterial species and are now understood to form part of a prokaryotic acquired immune system. CRISPR/Cas systems provide immunity in bacteria and archaea against viruses and plasmids by targeting the nucleic acids of the viruses and plasmids in a sequence-specific manner.

### SUMMARY

[0005] The present disclosure provides for polypeptides, such as effector proteins, compositions, methods and systems comprising the same, and uses thereof. In some instances, compositions, systems, and methods comprise effector partners and uses thereof. In some instances, compositions, systems, and methods comprise guide nucleic acids or uses thereof. Compositions, systems, and methods disclosed herein may leverage nucleic acid modifying activities. Nucleic acid modifying activities may include cis cleavage activity, trans cleavage activity, nicking activity, nuclease activity, and/or nucleobase modifying activity. In some instances, compositions, systems and methods are useful for the detection of target nucleic acids. In some instances, compositions, systems and methods are useful for the treatment of a disease or disorder. The disease or disorder may be associated with a target nucleic acid. The disease or disorder may be associated with one or more mutations in the target nucleic acid.

### I. CERTAIN EMBODIMENTS

[0006] Provided herein are compositions comprising an isolated polypeptide, or a recombinant nucleic acid encoding the isolated polypeptide, wherein the isolated polypeptide comprises an amino acid sequence that is at least 75% identical to any one of the sequences set forth in TABLE 1.

[0007] Also provided herein, are compositions comprising: a polypeptide, or a nucleic acid encoding the polypeptide, wherein the polypeptide comprises an amino acid sequence that is at least 75% identical to any one of the sequences set forth in TABLE 1; and an engineered guide nucleic acid or a DNA molecule that encodes the engineered guide nucleic acid.

[0008] Also provided herein, are compositions comprising: a polypeptide, or a nucleic acid encoding the polypeptide, wherein the polypeptide comprises an amino acid sequence that is at least 75% identical to any one of the sequences set forth in TABLE 1; a donor nucleic acid; and an engineered guide nucleic acid or a nucleic acid that encodes the engineered guide nucleic acid.

[0009] Also provided herein, are compositions comprising: an isolated polypeptide, or a recombinant nucleic acid encoding the isolated polypeptide, wherein the isolated polypeptide comprises an amino acid sequence that is at least 75% identical to any one of the sequences set forth in TABLE 1; and one or more partner polypeptides or isolated partner polypeptides, or one or more recombinant nucleic acids encoding the one or more partner polypeptides or isolated partner polypeptides.

[0010] Also provided herein, are compositions comprising: a polypeptide, or a nucleic acid encoding the polypeptide, wherein the polypeptide comprises an amino acid sequence that is at least 75% identical to any one of the sequences set forth in TABLE 1; one or more partner polypeptides, or one or more nucleic acids encoding the one or more partner polypeptides; and a nucleic acid, wherein the nucleic acid is a donor nucleic acid, or an engineered guide nucleic acid or a nucleic acid that encodes the engineered guide nucleic acid.

[0011] Also provided herein, are compositions comprising: a polypeptide, or a nucleic acid encoding the polypeptide, wherein the polypeptide comprises an amino acid sequence that is at least 75% identical to any one of the sequences set forth in TABLE 1; one or more partner polypeptides, or one or more nucleic acids encoding the one or more partner polypeptides; a donor nucleic acid; and an engineered guide nucleic acid or a nucleic acid that encodes the engineered guide nucleic acid.

[0012] In some embodiments, the one or more partner polypeptide comprises an amino acid sequence that is at least 75% identical to any one of the sequences set forth in TABLE 1.1.

[0013] Also provided herein, are compositions comprising one or more isolated partner polypeptides or one or more recombinant nucleic acids encoding the one or more isolated partner polypeptides wherein the one or more isolated partner polypeptide comprises an amino acid sequence that is at least 75% identical to any one of the sequences set forth in TABLE 1.1.

[0014] Also provided herein, are compositions comprising: one or more partner polypeptides, or one or more nucleic acids encoding the one or more partner polypeptides, wherein the one or more partner polypeptide comprises an amino acid sequence that is at least 75% identical to any one of the sequences set forth in TABLE 1.1; and a nucleic acid, wherein the nucleic acid is a donor nucleic acid, or an engineered guide nucleic acid or a nucleic acid that encodes the engineered guide nucleic acid. In some embodiments, the nucleic acid is a donor nucleic acid. In some embodiments, the nucleic acid is an engineered guide nucleic acid or a nucleic acid that encodes the engineered guide nucleic acid.

[0015] Also provided herein, are compositions comprising: one or more partner polypeptides, or one or more nucleic acids encoding the one or more partner polypeptides, wherein the one or more partner polypeptide comprises an amino acid sequence that is at least 75% identical to any one of the sequences set forth in TABLE 1.1; and a donor nucleic acid and an engineered guide nucleic acid or a nucleic acid that encodes the engineered guide nucleic acid.

[0016] In some embodiments, the polypeptide disclosed herein comprises an amino acid sequence that is at least 80% identical, at least 85% identical, at least 90% identical, at least 95% identical, or at least 100% identical to any one of the sequences set forth in TABLE 1.

[0017] In some embodiments, the composition disclosed herein comprises one or more, two or more, three or more, four or more, five or more partner polypeptides, or one or more nucleic acids encoding the one or more, two or more, three or more, four or more, five or more partner polypeptides. In some embodiments, the one or more partner polypeptides comprises an amino acid sequence that is at least 75% identical, at least 80% identical, at least 85% identical, at least 90% identical, at least 95% identical, or at least 100% identical to any one of the sequences set forth in TABLE 1.1.

[0018] In some embodiments, the composition disclosed herein comprises two or more partner polypeptides, or one or more nucleic acids encoding the two or more partner polypeptides.

[0019] Also provided herein, are compositions comprising one or more partner polypeptides, wherein each partner polypeptide independently comprises an amino acid sequence. In some embodiments, each partner polypeptide independently comprises an amino acid sequence that is 75% identical, at least 80% identical, at least 85% identical, at least 90% identical, at least 95% identical, or at least 100% identical to any one of the sequences set forth in TABLE 1.1. In some embodiments, each partner polypeptide independently comprises an amino acid sequence that is identical to any one of the sequences set forth in TABLE 1.1.

[0020] Also provided herein, are compositions comprising a polypeptide and a partner polypeptide combination as described in TABLE 6.

[0021] Also provided herein, are compositions comprising a nucleic acid that is a donor nucleic acid.

[0022] In some embodiments, the composition disclosed herein comprises modifies a target sequence in a target nucleic acid. In some embodiments, the target sequence is downstream to a protospacer adjacent motif (PAM). In some embodiments, the target nucleic acid comprises an insertion site, and optionally wherein the insertion site is recognized by a polypeptide or partner polypeptide.

[0023] Also provided herein, are compositions comprising a nucleic acid encoding an engineered guide nucleic acid or the engineered guide nucleic acid, wherein the engineered guide nucleic acid comprises a first region and a second region comprising a nucleic acid sequence that is complementary to the target sequence in the target nucleic acid, wherein the first region and the second region are heterologous to each other. In some embodiments, the first region, at least partially, interacts with the polypeptide, or partner polypeptide, or both. In some embodiments, the engineered guide nucleic acid comprises at least 10 contiguous nucleotides that are complementary to a eukaryotic sequence. In some embodiments, the engineered guide nucleic acid comprises one or more phosphorothioate (PS) backbone modifications, 2′-fluoro (2′-F) sugar modifications, or 2′-O-Methyl (2′OMe) sugar modifications.

[0024] Also provided herein, are compositions further comprising an additional engineered guide nucleic acid that binds a different loci of the target nucleic acid than the engineered guide nucleic acid.

[0025] Also provided herein, are compositions comprising one or more polypeptides, or one or more partner polypeptides, wherein the polypeptide or the partner polypeptide, or both, is fused to one or more heterologous polypeptide, and optionally wherein the heterologous polypeptide is a nuclear localization signal (NLS).

[0026] Also provided herein, are compositions comprising one or more polypeptides, wherein the polypeptide comprises a RuvC domain that is capable of cleaving a target nucleic acid. In some embodiments, the polypeptide is a nuclease that is capable of cleaving at least one strand of a target nucleic acid or the polypeptide is a nuclease that is capable of modification of at least one strand of a target nucleic acid. In some embodiments, the modification of the target nucleic acid comprises cleaving the target nucleic acid, deleting a nucleic acid of the target nucleic acid, inserting a nucleic acid into the target nucleic acid, substituting a nucleic acid of the target nucleic acid with an alternative nucleic acid, more than one of the foregoing, or combinations thereof. In some embodiments, the modification of the target nucleic acid comprises insertion of a nucleic acid into the target nucleic acid. In some embodiments, the modification of the target nucleic acid comprises insertion of a donor nucleic acid, deletion of a target nucleic acid, insertion of a donor nucleic acid fragment, deletion of a target nucleic acid fragment, or combinations thereof. In some embodiments, the donor nucleic acid can be a nucleotide, a nucleotide sequence, a coding sequence, a gene, a gene fragment, an exon, an intron, an exon fragment, an intron fragment, a gene regulatory region, a gene regulatory region fragment, coding sequences thereof, or combinations thereof. In some embodiments, the modification of the target nucleic acid comprises site-specific recombinase activity. In some embodiments, the modification of the target nucleic acid comprises transposase or transposase-like activity. In some embodiments, the modification of the target nucleic acid comprises modification of a length of about 100 base pairs to about 500 base pairs of the target nucleic acid. In some embodiments, the target sequence is within a human gene.

[0027] Also provided herein is a nucleic acid expression vector that encodes a polypeptide, wherein the polypeptide comprises an amino acid sequence that is at least 75% identical to any one of the sequences set forth in TABLE 1. In some embodiments, any of the nucleic acid expression vectors provided herein, encoding the polypeptide and/or the partner polypeptide further encodes a donor nucleic acid. In some embodiments, any of the nucleic acid expression vectors provided herein, encoding the polypeptide, the partner polypeptide, and/or a donor nucleic acid further encodes a target nucleic acid or wherein the library further comprises a separate nucleic acid expression vector encoding the target nucleic acid. In some embodiments, any of the nucleic acid expression vectors provided herein, wherein at least one nucleic acid expression vector is a viral vector. In some embodiments, the viral vector is an adeno associated viral (AAV) vector. In some embodiments, at least one of the nucleic acid expression vectors provided herein is a lipid or a lipid nanoparticle.

[0028] Also provided herein is a library of nucleic acid expression vectors comprising the any of the nucleic acid expression vectors provided herein, wherein the nucleic acid expression vector encoding the polypeptide further encodes a partner polypeptide or wherein the library further comprises a separate nucleic acid expression vector encoding the partner polypeptide, and wherein the partner polypeptide comprises an amino acid sequence that is at least 75% identical to any one of the sequences set forth in TABLE 1.1. In some embodiments, a library of any of the nucleic acid expression vectors provided herein, wherein the polypeptide and/or the partner polypeptide further encodes a donor nucleic acid. In some embodiments, a library of any of the nucleic acid expression vectors provided herein encoding the polypeptide, the partner polypeptide, and/or a donor nucleic acid. In some embodiments, a library of any of the nucleic acid expression vectors further encoding a target nucleic acid. In some embodiments, a library further comprising a separate nucleic acid expression vector encoding the donor nucleic acid. In some embodiments, a library further comprising a separate nucleic acid expression vector encoding the target nucleic acid. In some embodiments, a library further comprising a viral vector is an adeno associated viral (AAV) vector. In some embodiments, a library further comprising at least one nucleic acid expression vector is a lipid or a lipid nanoparticle.

[0029] Also provided herein is a pharmaceutical composition, comprising any one of the compositions provided herein, or any one of the nucleic acid expression vectors provided herein, or any one of the library of nucleic acid expression vectors provided herein, and a pharmaceutically acceptable excipient.

[0030] Also provided herein is a system comprising any one of the compositions provided herein, or any one of the nucleic acid expression vectors provided herein, or any one of the library of nucleic acid expression vectors provided herein. In some embodiments, a system comprising at least one detection reagent for detecting a target nucleic acid. In some embodiments, the at least one detection reagent is selected from a reporter nucleic acid, a detection moiety, an additional polypeptide, or a combination thereof, optionally wherein the reporter nucleic acid comprises a fluorophore, a quencher, or a combination thereof. In some embodiments, the at least one detection reagent is operably linked to a polypeptide or partner polypeptide, such that a detection event occurs upon contacting the system with a target nucleic acid. In some embodiments, any of the systems provided herein, further comprising at least one amplification reagent for amplifying a target nucleic acid. In some embodiments, the at least one amplification reagent is selected from the group consisting of a primer, an activator, a dNTP, an rNTP, and combinations thereof.

[0031] Also provided herein is a method of modifying a target nucleic acid comprising contacting the target nucleic acid with any one of the compositions provided herein, any one of the nucleic acid expression vectors provided herein, any one of the library of nucleic acid expression vectors provided herein, any one of the pharmaceutical compositions provided herein, or any one of the systems provided herein. In some embodiments, the method of modifying a target nucleic acid within a human gene. In some embodiments, the method of modifying a target nucleic acid associated with expression of a human gene. In some embodiments, the method of modifying wherein contacting thereby modifies the target nucleic acid. In some embodiments, modifying of the target nucleic acid comprises insertion or deletion of an exon, intron, exon fragment, intron fragment, gene regulatory region, gene regulatory region fragment, or any combinations thereof. In some embodiments, the method further comprising contacting the target nucleic acid with a guide nucleic acid. In some embodiments, the method is performed in a cell. In some embodiments, the method is performed in vivo. In some embodiments, the target nucleic acid comprises a mutation associated with a disease, and optionally wherein the disease is any one of the diseases recited in TABLE 5 and/or wherein the target nucleic acid is encoded by a gene recited in TABLE 4.

[0032] Also provided herein is a cell comprising any one of the compositions provided herein, any one of the nucleic acid expression vectors provided herein, any one of the library of nucleic acid expression vectors provided herein, or any one of the systems provided herein. In some embodiments, the cell comprises a target nucleic acid modified by any one of the compositions provided herein, any one of the nucleic acid expression vectors provided herein, any one of the library of nucleic acid expression vectors provided herein.

[0033] Also provided herein is a population of cells comprising at least one of the cells provided herein.

[0034] Also provided herein is a method of treating a disease associated with a mutation or aberrant expression of a human gene in a subject in need thereof, the method comprising administering to the subject the any one of the pharmaceutical compositions provided herein, and optionally wherein the disease is any one of the diseases recited in TABLE 5 and/or wherein the human gene is a gene recited in TABLE 4.

### INCORPORATION BY REFERENCE

[0035] All publications, patents, and patent applications mentioned in this specification are herein incorporated by reference to the same extent as if each individual publication, patent, or patent application was specifically and individually indicated to be incorporated by reference.

### DETAILED DESCRIPTION OF THE INVENTION

[0036] It is to be understood that both the foregoing general description and the following detailed description are exemplary, and explanatory only, and are not restrictive of the disclosure.

[0037] The section headings used herein are for organizational purposes only and are not to be construed as limiting the subject matter described.

[0038] All documents, or portions of documents, cited in this application, including, but not limited to, patents, patent applications, articles, books, and treatises, are hereby expressly incorporated by reference in their entirety for any purpose.

### II. DEFINITIONS

[0039] Unless otherwise indicated, all technical terms used herein have the same meaning as commonly understood by one of ordinary skill in the art to which this invention belongs. Unless otherwise indicated or obvious from context, the following terms have the following meanings:

[0040] As used in this specification and the appended claims, the singular forms “a,” “an,” and “the” include plural references unless the context clearly dictates otherwise.

[0041] Any reference to “or” herein is intended to encompass “and/or” unless otherwise stated. As used herein, the term “and/or” includes any and all combinations of one or more of the associated listed items.

[0042] Use of the term “including” as well as other forms, such as “includes” and “included,” is not limiting.

[0043] As used herein, the term “comprise” and its grammatical equivalents specifies the presence of stated features, integers, steps, operations, elements, and/or components, but does not preclude the presence or addition of one or more other features, integers, steps, operations, elements, components, and/or groups thereof.

[0044] As used herein, the term “about” in reference to a number or range of numbers is understood to mean the stated number and numbers+/−10% thereof, or 10% below the lower listed limit and 10% above the higher listed limit for the values listed for a range.

[0045] The terms “% identical,” “% identity,” and “percent identity,” or grammatical equivalents thereof, with reference to an amino acid sequence or nucleotide sequence, refer to the percent of residues that are identical between respective positions of two sequences when the two sequences are aligned for maximum sequence identity. The % identity is calculated by dividing the total number of the aligned residues by the number of the residues that are identical between the respective positions of the at least two sequences, and multiplying by 100. Generally, computer programs can be employed for such calculations. Illustrative programs that compare and align pairs of sequences, include ALIGN (Myers and Miller, Comput Appl Biosci. 1988 March; 4(1):11-7), FASTA (Pearson and Lipman, Proc Natl Acad Sci USA. 1988 April; 85(8):2444-8; Pearson, Methods Enzymol. 1990; 183:63-98) and gapped BLAST (Altschul et al., Nucleic Acids Res. 1997 Sep. 1; 25(17):3389-40), BLASTP, BLASTN, or GCG (Devereux et al., Nucleic Acids Res. 1984 Jan. 11; 12(1 Pt 1):387-95).

[0046] The terms “% complementary”, “% complementarity”, “percent complementary”, and “percent complementarity” or grammatical equivalents thereof, as used interchangeably herein, with reference to two or more nucleic acid molecules refers to the percent of nucleotides in two nucleotide sequences in said nucleic acid molecules of equal length that can undergo cumulative base pairing at two or more individual corresponding positions in an antiparallel orientation. The % complementary is calculated by dividing the total number of the complementary residues by the total number of the nucleotides in one of the equal length sequences, and multiplying by 100. Complete or total complementarity describes nucleotide sequences in 100% of the residues of a nucleotide sequence are complementary to residues in a reference nucleotide sequence. “Partial” complementarity describes nucleotide sequences in which at least 20%, but less than 100%, of the residues of a nucleotide sequence are complementary to residues in a reference nucleotide sequence. In some embodiments, at least 50%, but less than 100%, of the residues of a nucleotide sequence are complementary to residues in a reference nucleotide sequence. In some embodiments, at least 70%, 80%, 90% or 95%, but less than 100%, of the residues of a nucleotide sequence are complementary to residues in a reference nucleotide sequence. Sequences are said to be “substantially complementary” when at least 85% of the residues of a nucleotide sequence are complementary to residues in a reference nucleotide sequence. “Noncomplementary” describes nucleotide sequences in which less than 20% of the residues of a nucleotide sequence are complementary to residues in a reference nucleotide sequence.

[0047] The terms, “amplification” and “amplifying,” or grammatical equivalents thereof, as used herein, refers to a process by which a nucleic acid molecule is enzymatically copied to generate a plurality of nucleic acid molecules containing the same sequence as the original nucleic acid molecule or a distinguishable portion thereof.

[0048] The term “ATPase activity” refers to catalytic activity that results in the decomposition of ATP as an energy source to help power an enzymatic reaction.

[0049] The terms, “bind” or “binding,” as used herein, refer to a non-covalent interaction between macromolecules (e.g., between two polypeptides, between a polypeptide and a nucleic acid; between a polypeptide/guide nucleic acid complex and a target nucleic acid; and the like). While in a state of noncovalent interaction, the macromolecules are said to be “associated” or “interacting” or “binding” (e.g., when a molecule X is said to interact with a molecule Y, it is meant the molecule X binds to molecule Y in a non-covalent manner). Non-limiting examples of non-covalent interactions are ionic bonds, hydrogen bonds, van der Waals and hydrophobic interactions. Not all components of a binding interaction need be sequence-specific (e.g., contacts with phosphate residues in a DNA backbone), but some portions of a binding interaction may be sequence-specific.

[0050] The term, “catalytically inactive effector protein,” as used herein, refers to an effector protein that is modified relative to a naturally-occurring effector protein to have a reduced or eliminated catalytic activity relative to that of the naturally-occurring effector protein, but retains its ability to interact with a guide nucleic acid. The catalytic activity that is reduced or eliminated is often a nuclease activity. The naturally-occurring effector protein may be a wildtype protein. In some instances, the catalytically inactive effector protein is referred to as a catalytically inactive variant of an effector protein, e.g., a Cas effector protein.

[0051] The term, “cis cleavage,” as used herein, refers to cleavage (hydrolysis of a phosphodiester bond) of a target nucleic acid by a complex of an effector protein and a guide nucleic acid, wherein at least a portion of the guide nucleic acid is hybridized to at least a portion of the target nucleic acid. Cleavage may occur within or directly adjacent to the portion of the target nucleic acid that is hybridized to the portion of the guide nucleic acid.

[0052] The term “codon optimized” as used herein refers to a mutation of a nucleotide sequence encoding a polypeptide, such as a nucleotide sequence encoding an effector protein, to mimic the codon preferences of the intended host organism or cell while encoding the same polypeptide. Thus, the codons can be changed, but the encoded polypeptide remains unchanged. For example, if the intended target cell was a human cell, a human codon-optimized nucleotide sequence encoding an effector protein could be used. As another non-limiting example, if the intended host cell were a mouse cell, then a mouse codon-optimized nucleotide sequence encoding an effector protein could be generated. As another non-limiting example, if the intended host cell were a eukaryotic cell, then an eukaryote codon-optimized nucleotide sequence encoding an effector protein could be generated. As another non-limiting example, if the intended host cell were a prokaryotic cell, then a prokaryote codon-optimized nucleotide sequence encoding an effector protein could be generated. Codon usage tables are readily available, for example, at the “Codon Usage Database” available at www.kazusa.or.jp/codon.

[0053] The terms, “complementary” and “complementarity,” as used herein, with reference to a nucleic acid molecule or nucleotide sequence, refers to the characteristic of a polynucleotide having nucleotides that can undergo cumulative base pairing with a reference nucleic acid at two or more individual corresponding positions in antiparallel orientation. For example, when every nucleotide in a polynucleotide forms a base pair with every nucleotide in a reference nucleic acid, that polynucleotide is said to be 100% complementary to the reference nucleic acid. However, the term “complementary” by itself can include nucleic acid sequences that are not completely complementary over their entire length. Accordingly, the term “complementary” includes one or more mismatches. A “mismatch” is present at any position in the two opposed nucleotides are not complementary. In a double stranded DNA or RNA sequence, the upper (sense) strand sequence is, in general, understood as going in the direction from its 5′- to 3′-end, and the complementary sequence is thus understood as the sequence of the lower (antisense) strand in the same direction as the upper strand. Following the same logic, the reverse sequence is understood as the sequence of the upper strand in the direction from its 3′- to its 5′-end, while the ‘reverse complement’ sequence or the ‘reverse complementary’ sequence is understood as the sequence of the lower strand in the direction of its 5′- to its 3′-end. Each nucleotide in a nucleic acid that can be paired with its Watson-Crick counterpart (e.g, C with G; A with T/U) is called its complementary nucleotide. The complementarity of modified or artificial base pairs can be based on other types of hydrogen bonding and/or hydrophobicity of bases and/or shape complementarity between bases.

[0054] The term, “cleavage assay,” as used herein, refers to an assay designed to visualize, quantitate or identify cleavage of a nucleic acid. In some instances, the cleavage activity may be cis-cleavage activity. In some instances, the cleavage activity may be trans-cleavage activity. A non-limiting example of a cleavage assay is provided in Example 3.

[0055] The terms, “cleave,” “cleaving,” and “cleavage,” as used herein, with reference to a nucleic acid molecule or nuclease activity of an effector protein, refer to the hydrolysis of a phosphodiester bond of a nucleic acid molecule that results in breakage of that bond. The result of this breakage can be a nick (hydrolysis of a single phosphodiester bond on one side of a double-stranded molecule), single strand break (hydrolysis of a single phosphodiester bond on a single-stranded molecule) or double strand break (hydrolysis of two phosphodiester bonds on both sides of a double-stranded molecule) depending upon whether the nucleic acid molecule is single-stranded (e.g., ssDNA or ssRNA) or double-stranded (e.g., dsDNA) and the type of nuclease activity being catalyzed by the effector protein.

[0056] The term, “clustered regularly interspaced short palindromic repeats (CRISPR),” as used herein, refers to a segment of DNA found in the genomes of certain prokaryotic organisms, including some bacteria and archaea, that includes repeated short sequences of nucleotides interspersed at regular intervals between unique sequences of nucleotides derived from another organism.

[0057] The term “cointegrase activity” as used herein refers to catalytic activity that results in the transposition recombination of a first nucleic acid into a second nucleic acid.

[0058] The term, “conservative substitution” as used herein refers to the replacement of one amino acid for another such that the replacement takes place within a family of amino acids that are related in their side chains. Conversely, the term “non-conservative substitution” as used herein refers to the replacement of one amino acid residue for another that does not have a related side chain. Genetically encoded amino acids can be divided into four families having related side chains: (1) acidic (negatively charged): Asp (D), Glu (E); (2) basic (positively charged): Lys (K), Arg (R), His (H); (3) non-polar (hydrophobic): Cys (C), Ala (A), Val (V), Leu (L), Ile (I), Pro (P), Phe (F), Met (M), Trp (W), Gly (G), Tyr (Y), with non-polar also being subdivided into: (i) strongly hydrophobic: Ala (A), Val (V), Leu (L), Ile (I), Met (M), Phe (F); and (ii) moderately hydrophobic: Gly (G), Pro (P), Cys (C), Tyr (Y), Trp (W); and (4) uncharged polar: Asn (N), Gln (Q), Ser (S), Thr (T). Amino acids may be related by aliphatic side chains: Gly (G), Ala (A), Val (V), Leu (L), Ile (I), Ser (S), Thr (T), with Ser (S) and Thr (T) optionally being grouped separately as aliphatic-hydroxyl; Amino acids may be related by aromatic side chains: Phe (F), Tyr (Y), Trp (W). Amino acids may be related by amide side chains: Asn (N), Gln (Q). Amino acids may be related by sulfur-containing side chains: Cys (C) and Met (M).

[0059] The terms, “CRISPR RNA” or “crRNA,” as used herein, refers to a type of guide nucleic acid which is capable of interacting with an effector protein and/or to a target sequence of a target nucleic acid.

[0060] The term, “detectable signal,” as used herein, refers to a signal that can be detected using optical, fluorescent, chemiluminescent, electrochemical or other detection methods known in the art.

[0061] The term, “donor nucleic acid,” as used herein, refers to a nucleic acid that is (designed or intended to be) incorporated into a target nucleic acid or target sequence.

[0062] The term “dual nucleic acid system” as used herein refers to a system of a transactivated or transactivating guide nucleic acid-tracrRNA duplex that is complexed with one or more polypeptides described herein and imparts sequence selectivity to the complex when interacting with a target nucleic acid

[0063] The term, “effector protein,” as used herein, refers to a protein, polypeptide, or peptide that is capable of interacting with a nucleic acid, such as a guide nucleic acid, to form a complex, wherein the complex interacts with a target nucleic acid.

[0064] The term, “effector partner” or “partner polypeptide” as used herein, refers to a polypeptide that does not have 100% sequence identity with an effector protein described herein. In some instances, an effector partner described herein may be found in a homologous genome as an effector protein described herein.

[0065] The term, “engineered modification,” as used herein refers to a modification of one or more nucleic acid residues of a nucleotide sequence or one or more amino acid residue of an amino acid sequence, such as chemical modification of one or more nucleobases; or chemical modifications to the phosphate backbone, a nucleotide, a nucleobase, or a nucleoside. Such modifications can be made to an effector protein amino acid sequence or guide nucleic acid nucleotide sequence, or any sequence disclosed herein (e.g., a nucleic acid encoding an effector protein or a nucleic acid that encodes a guide nucleic acid). Methods of modifying a nucleic acid or amino acid sequence are known. One of ordinary skill in the art will appreciate that the engineered modification(s) may be located at any position(s) of a nucleic acid such that the function of the nucleic acid, protein, composition or system is not substantially decreased. Nucleic acids provided herein can be prepared according to any available technique including, but not limited to chemical synthesis, enzymatic synthesis, which is generally termed in vitro-transcription, cloning, enzymatic, or chemical cleavage, etc. In some instances, the nucleic acids provided herein are not uniformly modified along the entire length of the molecule. Different nucleotide modifications and/or backbone structures can exist at various positions within the nucleic acid.

[0066] The term, “functional fragment,” as used herein, refers to a fragment of a protein that retains some function relative to the entire protein. Non-limiting examples of functions are nucleic acid binding, protein binding, nuclease activity, nickase activity, deaminase activity, demethylase activity, or acetylation activity. A functional fragment may be a recognized functional domain, e.g., a catalytic domain such as, but not limited to, a RuvC domain.

[0067] The term, “functional fragment,” as used herein, refers to a fragment of a protein that retains some function relative to the entire protein. Non-limiting examples of functions are nucleic acid binding, protein binding, nuclease activity, nickase activity, transposase activity, cointegrase activity, ATPase activity, deaminase activity, demethylase activity, or acetylation activity. A functional fragment may be a recognized functional domain, e.g., a catalytic domain such as, but not limited to, a RuvC domain.

[0068] The term “fusion protein,” as used herein refers to a heterologous protein comprising at least two polypeptides. A fusion protein may comprise one or more of an effector protein and an effector partner, and a fusion partner.

[0069] The term “fusion partner,” as used herein, refers to a protein, polypeptide or peptide that is fused, or linked via a linker, to one or more of an effector protein and an effector partner. The fusion partner can impart some function to the fusion protein that is not provided by the effector protein or the effector partner.

[0070] The term, “genetic disease,” as used herein, refers to a disease, disorder, condition, or syndrome associated with or caused by one or more mutations in the DNA of an organism having the genetic disease.

[0071] The term, “guide nucleic acid,” as used herein, refers to a nucleic acid that, when in a complex with one or more polypeptides described herein can impart sequence selectivity to the complex when the complex interacts with a target nucleic acid. A guide nucleic acid may be referred to interchangeably as a guide RNA, however it is understood that guide nucleic acids may comprise deoxyribonucleotides (DNA), ribonucleotides (RNA), a combination thereof (e.g., RNA with a thymine base), biochemically or chemically modified nucleobases (e.g., one or more engineered modifications described herein), or combinations thereof.

[0072] The term, “handle sequence” as used herein, refers to a sequence of nucleotides in a single guide RNA (sgRNA), that is: 1) capable of being non-covalently bound by an effector protein and 2) connects the portion of the sgRNA capable of being non-covalently bound by an effector protein to a nucleotide sequence that is hybridizable to a target nucleic acid.

[0073] The term, “heterologous,” as used herein, with reference to at least two different polypeptide sequences, means that the two different polypeptide sequences are not found similarly connected to one another in a native nucleic acid or protein. A protein that is heterologous to the effector protein is a protein that is not covalently linked via an amide bond to the effector protein in nature. In some instances, a heterologous protein is not encoded by a species that encodes the effector protein. A guide nucleic acid may comprise a first sequence and a second sequence, wherein the first sequence and the second sequence are not found covalently linked via a phosphodiester bond in nature. Thus, the first sequence is considered to be heterologous with the second sequence, and the guide nucleic acid may be referred to as a heterologous guide nucleic acid.

[0074] The term, “hybridize,” “hybridizable,” or grammatical equivalents thereof refers to a sequence of nucleotides that is able to noncovalently bind, i.e. form Watson-Crick base pairs and/or G/U base pairs, or anneal, to another nucleotide sequence in a sequence-specific, antiparallel, manner (i.e., a nucleotide sequence specifically binds to a complementary nucleotide sequence) under the appropriate in vitro and/or in vivo conditions of temperature and solution ionic strength. Standard Watson-Crick base-pairing includes: adenine (A) pairing with thymidine (T), adenine (A) pairing with uracil (U), and guanine (G) pairing with cytosine (C) for both DNA and RNA. In addition, for hybridization between two RNA molecules (e.g., dsRNA), and for hybridization of a DNA molecule with an RNA molecule (e.g., when a DNA target nucleic acid base pairs with a guide RNA, etc.): guanine (G) can also base pair with uracil (U). For example, G/U base-pairing is at least partially responsible for the degeneracy (i.e., redundancy) of the genetic code in the context of tRNA anti-codon base-pairing with codons in mRNA. Thus, a guanine (G) can be considered complementary to both an uracil (U) and to an adenine (A). Accordingly, when a G/U base-pair can be made at a given nucleotide position, the position is not considered to be non-complementary, but is instead considered to be complementary.

[0075] While hybridization typically occurs between two nucleotide sequences that are complementary, mismatches between bases are possible. It is understood that two nucleotide sequences need not be 100% complementary to be specifically hybridizable, hybridizable, partially hybridizable, or for hybridization to occur. Moreover, a nucleotide sequence may hybridize over one or more segments such that intervening or adjacent segments are not involved in the hybridization event (e.g., a bulge, a loop structure or hairpin structure, etc.).

[0076] The term “intermediary sequence” or “intermediary RNA sequence” as used herein in a context of a single nucleic acid system, refers to a sequence of nucleotides in a guide nucleic acid that is capable of, at least partially, being non-covalently bound by an effector protein to form a complex. An intermediary RNA sequence is not a transactivating nucleic acid in systems, methods, and compositions described herein.

[0077] The term, “in vitro,” as used herein, is used to describe something outside an organism. An in vitro system, composition or method may take place in a container for holding laboratory reagents such that it is separated from the biological source from which a material in the container is obtained. In vitro assays can encompass cell-based assays in which living or dead cells are employed. In vitro assays can also encompass a cell-free assay in which no intact cells are employed. The term “in vivo” is used to describe an event that takes place within an organism. The term “ex vivo” is used to describe an event that takes place in a cell that has been obtained from an organism. An ex vivo assay is not performed on a subject. Rather, it is performed upon a sample separate from a subject.

[0078] The term “insertion site” as used herein refers to a location on a target nucleic acid into which a donor nucleic acid may be inserted.

[0079] The term “length” as it applies to a nucleic acid (polynucleotide) or polypeptide may be expressed as “kilobases” (kb) or “base pairs (bp),” and may be used interchangeably with the term, “linked nucleosides.” Thus, a length of 1 kb refers to a length of 1000 linked nucleosides, and a length of 500 bp refers to a length of 500 linked nucleosides. Similarly, a protein having a length of 500 linked amino acids may also be simply described as having a length of 500 amino acids.

[0080] The term, “linker,” as used herein, refers to a covalent bond or molecule that links a first polypeptide to a second polypeptide or a first nucleic acid to a second nucleic acid.

[0081] The term, “modified target nucleic acid,” as used herein, refers to a target nucleic acid, wherein the target nucleic acid has undergone a modification, for example, after contact with an effector protein. In some instances, the modification is an alteration in the sequence of the target nucleic acid. In some instances, the modified target nucleic acid comprises an insertion, deletion, or substitution of one or more nucleotides compared to the unmodified target nucleic acid.

[0082] The term, “mutation” as used herein when describing an alteration or modification that changes an amino acid residue or a nucleotide as described herein, such a change or changes can include, for example, deletions, insertions, and/or substitutions. The mutation can refer to a change in structure of an amino acid residue or nucleotide relative to the starting or reference residue or nucleotide. A mutation of an amino acid residue includes, for example, deletions, insertions and substituting one amino acid residue for a structurally different amino acid residue. Such substitutions can be a conservative substitution, a non-conservative substitution, a substitution to a specific sub-class of amino acids, or a combination thereof as described herein. A mutation of a nucleotide includes, for example, changing one naturally occurring base for a different naturally occurring base, such as changing an adenine to a thymine or a guanine to a cytosine or an adenine to a cytosine or a guanine to a thymine. A mutation of a nucleotide base may result in a structural and/or functional alteration of the encoding peptide, polypeptide or protein by changing the encoded amino acid residue of the peptide, polypeptide or protein. A mutation of a nucleotide base may not result in an alteration of the amino acid sequence or function of encoded peptide, polypeptide or protein, also known as a silent mutation. Methods of mutating an amino acid residue or a nucleotide are well known.

[0083] The terms, “mutation associated with a disease,” and “mutation associated with a genetic disorder,” as used herein, refers to the co-occurrence of a mutation and the phenotype of a disease. The mutation may occur in a gene, wherein transcription or translation products from the gene occur at a significantly abnormal level or in an abnormal form in a cell or subject harboring the mutation as compared to a non-disease control subject not having the mutation.

[0084] The term, “nickase” as used herein refers to an enzyme that possess catalytic activity for single stranded nucleic acid cleavage of a double stranded nucleic acid.

[0085] The term “nickase activity” as used herein refers to catalytic activity that results in single stranded nucleic acid cleavage of a double stranded nucleic acid.

[0086] The terms, “non-naturally occurring” and “engineered,” as used herein, are used interchangeably and indicate the involvement of the hand of man. The terms, when referring to a nucleic acid, nucleotide, protein, polypeptide, peptide or amino acid, refer to a molecule, such as but not limited to, a nucleic acid, nucleotide, protein, polypeptide, peptide or amino acid refers to a modification of that molecule (e.g., chemical modification, nucleotide sequence, or amino acid sequence) that is not present in the naturally molecule. The terms, when referring to a composition or system described herein, refer to a composition or system having at least one component that is not naturally associated with the other components of the composition or system. By way of a non-limiting example, a composition may include an effector protein and a guide nucleic acid that do not naturally occur together. Conversely, and as a non-limiting further clarifying example, an effector protein or guide nucleic acid that is “natural,” “naturally-occurring,” or “found in nature” includes an effector protein and a guide nucleic acid from a cell or organism that have not been genetically modified by the hand of man.

[0087] The terms, “nuclease” and “endonuclease” are used interchangeably herein, refer to an enzyme which possesses catalytic activity for nucleic acid cleavage.

[0088] The term, “nuclease activity,” is used herein, refers to catalytic activity that results in nucleic acid cleavage (e.g., ribonuclease activity (ribonucleic acid cleavage), or deoxyribonuclease activity (deoxyribonucleic acid cleavage), etc.).

[0089] The term, “nucleic acid,” as used herein refers to a polymer of nucleotides. A nucleic acid may comprise ribonucleotides, deoxyribonucleotides, combinations thereof, and modified versions of the same. A nucleic acid may be single-stranded or double-stranded, unless specified. Non-limiting examples of nucleic acids are double stranded DNA (dsDNA), single stranded (ssDNA), messenger RNA, genomic DNA, cDNA, DNA-RNA hybrids, and a polymer comprising purine and pyrimidine bases or other natural, chemically or biochemically modified, non-natural, or derivatized nucleotide bases. Accordingly, nucleic acids as described herein may comprise one or more mutations, one or more engineered modifications, or both.

[0090] The term, “nucleic acid expression vector,” as used herein, refers to a plasmid that can be used to express a nucleic acid of interest.

[0091] The term, “nuclear localization signal (NLS),” as used herein, refers to an entity (e.g., peptide) that facilitates localization of a nucleic acid, protein, or small molecule to the nucleus, when present in a cell that contains a nuclear compartment.

[0092] A person of ordinary skill in the art would appreciate that referring to a “nucleotide(s)”, and/or “nucleoside(s)”, in the context of a nucleic acid molecule having multiple residues, is interchangeable and describe the sugar and base of the residue contained in the nucleic acid molecule. Similarly, a skilled artisan could understand that linked nucleotides and/or linked nucleosides, as used in the context of a nucleic acid having multiple linked residues, are interchangeable and describe linked sugars and bases of residues contained in a nucleic acid molecule. When referring to a “nucleobase(s)”, or linked nucleobase, as used in the context of a nucleic acid molecule, it can be understood as describing the base of the residue contained in the nucleic acid molecule, for example, the base of a nucleotide, nucleosides, or linked nucleotides or linked nucleosides. A person of ordinary skill in the art when referring to nucleotides, nucleosides, and/or nucleobases would also understand the differences between RNA and DNA (generally the exchange of uridine for thymidine or vice versa) and the presence of nucleoside analogs, such as modified uridines, do not contribute to differences in identity or complementarity among polynucleotides as long as the relevant nucleotides (such as thymidine, uridine, or modified uridine) have the same complement (e.g., adenosine for all of thymidine, uridine, or modified uridine; another example is cytosine and 5-methylcytosine, both of which have guanosine or modified guanosine as a complement). Thus, for example, the sequence 5′-AXG where X is any modified uridine, such as pseudouridine, NI-methyl pseudouridine, or 5-methoxyuridine, is considered 100% identical to AUG in that both are perfectly complementary to the same sequence (5′-CAU).

[0093] The term “pharmaceutically acceptable excipient, carrier or diluent,” as used herein, refers to any substance formulated alongside the active ingredient of a pharmaceutical composition that allows the active ingredient to retain biological activity and is non-reactive with the subject's immune system. Such a substance can be included for the purpose of long-term stabilization, bulking up solid formulations that contain potent active ingredients in small amounts, or to confer a therapeutic enhancement on the active ingredient in the final dosage form, such as facilitating absorption, reducing viscosity, or enhancing solubility. The selection of appropriate substance can depend upon the route of administration and the dosage form, as well as the active ingredient and other factors. Compositions having such substances can be formulated by suitable methods (see, e.g., Remington's Pharmaceutical Sciences, 18th edition, A. Gennaro, ed., Mack Publishing Co., Easton, Pa., 1990; and Remington, The Science and Practice of Pharmacy 21st Ed. Mack Publishing, 2005).

[0094] The terms, “polypeptide” and “protein” which are used interchangeably herein, refer to a polymeric form of amino acids. A polypeptide may include coded and non-coded amino acids, chemically or biochemically modified or derivatized amino acids, and polypeptides having modified peptide backbones. Accordingly, polypeptides as described herein may comprise one or more mutations, one or more engineered modifications, or both. A peptide generally has a length of 100 or fewer linked amino acids.

[0095] The term, “promoter” or “promoter sequence,” is a DNA regulatory region capable of binding RNA polymerase and initiating transcription of a downstream (3′ direction) coding or non-coding sequence. A transcription initiation site, as well as protein binding domains responsible for the binding of RNA polymerase, can also be found in a promoter region. Eukaryotic promoters will often, but not always, contain “TATA” boxes and “CAT” boxes. Various promoters, including inducible promoters, may be used to drive expression by the various vectors of the present disclosure.

[0096] The term, “protospacer adjacent motif (PAM),” as used herein, refers to a nucleotide sequence found in a target nucleic acid that directs an effector protein to modify the target nucleic acid at a specific location. In some instances, a PAM is required for a complex of an effector protein and a guide nucleic acid to hybridize to and modify the target nucleic acid. In some instances, the complex does not require a PAM to modify the target nucleic acid.

[0097] The term, “recombinant,” as used herein, as applied to proteins, polypeptides, peptides and nucleic acids, refers to proteins, polypeptides, peptides and nucleic acids that are products of various combinations of cloning, restriction, and/or ligation steps resulting in a construct having a structural coding or non-coding sequence distinguishable from endogenous nucleic acids found in natural systems.

[0098] The term, “regulatory element,” used herein, refers to transcriptional and translational control sequences, such as promoters, enhancers, polyadenylation signals, terminators, protein degradation signals, and the like, that provide for and/or regulate transcription of a non-coding sequence (e.g., a guide nucleic acid) or a coding sequence (e.g., effector proteins, fusion proteins, and the like) and/or regulate translation of an encoded polypeptide.

[0099] The term “repeat hybridization sequence” as used herein refers to a sequence of nucleotides that is, at least, partially complementary to a repeat sequence.

[0100] The term “repeat sequence” as used herein refers to a sequence of nucleotides in a guide nucleic acid that is capable of, at least partially, interacting with an effector protein.

[0101] The terms, “reporter” and “reporter nucleic acid” are used interchangeably herein to refer to a non-target nucleic acid molecule that can provide a detectable signal upon cleavage by an effector protein. Examples of detectable signals and detectable moieties that generate detectable signals are provided herein.

[0102] The term “ribonucleotide protein complex” or “RNP” as used herein refers to a complex of one or more nucleic acids and one or more polypeptides. While the term utilizes “ribonucleotides” it is understood that the one or more nucleic acid may comprise deoxyribonucleotides (DNA), ribonucleotides (RNA), a combination thereof (e.g., RNA with a thymine base), biochemically or chemically modified nucleobases (e.g., one or more enginereed modifications described herein), or combinations thereof.

[0103] The term, “sample,” as used herein, generally refers to something comprising a target nucleic acid. In some instances, the sample is a biological sample, such as a biological fluid or tissue sample. In some instances, the sample is an environmental sample. The sample may be a biological sample or environmental sample that is modified or manipulated. By way of non-limiting example, samples may be modified or manipulated with purification techniques, heat, nucleic acid amplification, salts and buffers.

[0104] The terms “single guide nucleic acid”, “single guide RNA” and “sgRNA” as used interchangeably herein refers to a type of guide nucleic acid in a single nucleic acid system that interacts with one or more polypeptides described herein to form a complex and imparts sequence selectivity to said complex.

[0105] The term “single nucleic acid system” as used herein refers to a guide nucleic acid wherein the guide nucleic acid is a single polynucleotide chain having all the required sequences for a functional complex with an effector protein (e.g., being bound by an effector protein, including in some instances activating the effector protein, and hybridizing to a target nucleic acid, without the need for a second nucleic acid molecule). For example, an sgRNA can have two or more linked guide nucleic acid components (e.g., a repeat sequence and a spacer sequence or a handle sequence and a spacer sequence).

[0106] The term “spacer sequence” as used herein, refers to a sequence of nucleotides in guide nucleic acid, which is, at least partially, hybridizable to an equal length of a sequence (e.g., a target sequence) of a target nucleic acid.

[0107] The term, “subject,” as used herein, refers to an animal. The subject may be a mammal. The subject may be a human. The subject may be diagnosed or at risk for a disease.

[0108] A “syndrome”, as used herein, refers to a group of symptoms which, taken together, characterize a condition.

[0109] The term, “target nucleic acid,” as used herein, refers to a nucleic acid that is selected as the nucleic acid for modification, binding, hybridization or any other activity of or interaction with a nucleic acid, protein, polypeptide, or peptide described herein. A target nucleic acid may comprise RNA, DNA, or a combination thereof. A target nucleic acid may be single-stranded (e.g., single-stranded RNA or single-stranded DNA) or double-stranded (e.g., double-stranded DNA).

[0110] The term, “target sequence,” as used herein, when used in reference to a target nucleic acid, refers to a sequence of nucleotides found within a target nucleic acid. Such a sequence of nucleotides can, for example, hybridize to a respective length portion of a guide nucleic acid.

[0111] The term “trans-activating RNA”, “transactivating RNA” or “tracrRNA” refers to a transactivating or transactivated nucleic acid in a dual nucleic acid system that interacts with an effector protein and hybridizes, at least partially, to a guide nucleic acid to form a guide nucleic acid-tracrRNA duplex.

[0112] The term “transactivating” or “trans-activating” as used herein, refers to an outcome of a dual nucleic acid system wherein the two nucleic acids are required to hybridize for the system to have activity.

[0113] The term “trans cleavage,” as used herein, in reference to cleavage (e.g, hydrolysis of a phosphodiester bond) of one or more non-target nucleic acids by an effector protein that is complexed with a guide nucleic acid and a target nucleic acid. Trans cleavage activity may be triggered by the hybridization of a guide nucleic acid to a target nucleic acid. The effector protein may cleave the target nucleic acid as well as non-target nucleic acids.

[0114] The term “transcriptional activator,” as used herein, refers to a polypeptide or a fragment thereof that can activate or increase transcription of a target nucleic acid molecule.

[0115] The term “transcriptional repressor,” as used herein, refers to a polypeptide or a fragment thereof that is capable of arresting, preventing, or reducing transcription of a target nucleic acid.

[0116] The term “transgene” as used herein refers to a nucleotide sequence that is inserted into a cell for expression of said nucleotide sequence in the cell. A transgene is meant to include (1) a nucleotide sequence that is not naturally found in the cell (e.g., a heterologous nucleotide sequence); (2) a nucleotide sequence that is a mutant form of a nucleotide sequence naturally found in the cell into which it has been introduced; (3) a nucleotide sequence that serves to add additional copies of the same (e.g., exogenous or homologous) or a similar nucleotide sequence naturally occurring in the cell into which it has been introduced; or (4) a silent naturally occurring or homologous nucleotide sequence whose expression is induced in the cell into which it has been introduced. A donor nucleic acid can comprise a transgene. The cell in which transgene expression occurs can be a target cell, such as a host cell.

[0117] The terms, “treatment” or “treating,” are used herein in reference to a pharmaceutical or other intervention regimen for obtaining beneficial or desired results in the recipient. Beneficial or desired results include but are not limited to a therapeutic benefit and/or a prophylactic benefit. A therapeutic benefit may refer to eradication or amelioration of symptoms or of an underlying disorder being treated. Also, a therapeutic benefit can be achieved with the eradication or amelioration of one or more of the physiological symptoms associated with the underlying disorder such that an improvement is observed in the subject, notwithstanding that the subject may still be afflicted with the underlying disorder. A prophylactic effect includes delaying, preventing, or eliminating the appearance of a disease or condition, delaying, or eliminating the onset of symptoms of a disease or condition, slowing, halting, or reversing the progression of a disease or condition, or any combination thereof. For prophylactic benefit, a subject at risk of developing a particular disease, or to a subject reporting one or more of the physiological symptoms of a disease may undergo treatment, even though a diagnosis of this disease may not have been made.

[0118] The term “transposase activity” as used herein refers to catalytic activity that results in the transposition of a first nucleic acid into a second nucleic acid.

[0119] The term, “variant,” is intended to mean a form or version of a protein that differs from the wild-type protein. A variant may have a different function or activity relative to the wild-type protein.

[0120] The term “viral vector,” as used herein, refers to a nucleic acid to be delivered into a host cell via a recombinantly produced virus or viral particle.

### III. INTRODUCTION

[0121] Disclosed herein are compositions, systems and methods comprising at least one of:
[0122] a) a polypeptide or a nucleic acid encoding the polypeptide;
[0123] b) a partner polypeptide or a nucleic acid encoding the partner polypeptide; and
[0124] c) a guide nucleic acid or a nucleic acid encoding the guide nucleic acid.

[0125] Polypeptides described herein may recognize a desired nucleic acid, such as a target nucleic acid, and cleave a desired nucleic acid by either cis or trans cleavage. In some embodiments, a polypeptide described herein may bind to a target sequence of a target nucleic acid and cleave a desired nucleic acid by either cis or trans cleavage. In some embodiments, a polypeptide is activated when it binds a target sequence of a target nucleic acid to cleave a region of the target nucleic acid that is near, but not adjacent to the target sequence. A polypeptide may be an effector protein, such as a CRISPR-associated (Cas) protein, which may be coupled to a guide nucleic acid that imparts activity or sequence selectivity to the polypeptide.

[0126] Also described herein is a partner polypeptide or use thereof. In general, a partner polypeptide comprises an amino acid sequence that is not 100% identical to a polypeptide (i.e., effector protein) described above. Partner polypeptides described herein may have biological activity that is synergistic, complementary, or additive to the activity of polypeptides (i.e., effector proteins) described above. A partner polypeptide may be an effector partner.

[0127] In general, guide nucleic acids comprise a first sequence, at least a portion of which interacts with a polypeptide. In some embodiments, guide nucleic acids may further comprise a second sequence that is at least partially complementary to a target nucleic acid.

[0128] In some embodiments, effector proteins and/or effector partners described herein are encoded by a codon optimized nucleic acid. In some embodiments, a nucleic acid sequence encoding an effector protein and/or effector partner described herein, is codon optimized. In some embodiments, effector proteins and/or effector partners described herein may be codon optimized for expression in a specific cell, for example, a bacterial cell, a plant cell, a eukaryotic cell, an animal cell, a mammalian cell, or a human cell. In some embodiments, the effector protein and/or effector partner is codon optimized for a human cell. It is understood that when describing coding sequences of polypeptides described herein, said coding sequences do not necessarily require a codon encoding a N-terminal Methionine (M) or a Valine (V) as described for the effector proteins described herein. One skilled in the art would understand that a start codon could be replaced or substituted with a start codon that encodes for an amino acid residue sufficient for initiating translation in a host cell. In some embodiments, when a modifying heterologous peptide, such as a fusion partner protein, protein tag or NLS, is located at the N terminus of the effector protein, a start codon for the heterologous peptide serves as a start codon for the effector protein as well. Thus, the natural start codon encoding an amino acid residue sufficient for initiating translation (e.g., Methionine (M) or a Valine (V)) of the effector protein may be removed or absent.

[0129] The compositions, systems and methods described herein are non-naturally occurring. In some embodiments, compositions, systems and methods comprise an engineered guide nucleic acid or a use thereof. In some embodiments, compositions, systems and methods comprise an engineered polypeptide or a use thereof. In some embodiments, compositions, systems and methods comprise an isolated polypeptide or a use thereof. In general, compositions, methods and systems described herein are not found in nature. In some embodiments, compositions, methods and systems described herein comprise at least one non-naturally occurring component. For example, disclosed compositions, methods and systems may comprise a guide nucleic acid, wherein the sequence of the guide nucleic acid is different or modified from that of a naturally-occurring guide nucleic acid.

[0130] In some embodiments, compositions, systems and methods comprise at least two components that do not naturally occur together. For example, disclosed compositions, methods and systems may comprise a guide nucleic acid comprising a repeat region and a spacer region which do not naturally occur together. Also, by way of non-limiting example, disclosed compositions, methods and systems may comprise a guide nucleic acid and an effector protein that do not naturally occur together. Similarly, disclosed compositions, methods and systems may comprise a guide nucleic acid and an effector partner that do not naturally occur together. Conversely, and for clarity, an effector protein, effector partner, or guide nucleic acid that is “natural,” “naturally-occurring,” or “found in nature” includes effector proteins, effector partners and guide nucleic acids from cells or organisms that have not been genetically modified by a human or machine.

[0131] In some embodiments, the guide nucleic acid comprises a non-natural nucleotide sequence. In some embodiments, the non-natural nucleotide sequence is a nucleotide sequence that is not found in nature. The non-natural nucleotide sequence may comprise a portion of a naturally-occurring sequence, wherein the portion of the naturally-occurring sequence is not present in nature absent the remainder of the naturally-occurring sequence. In some embodiments, the guide nucleic acid comprises two naturally-occurring sequences arranged in an order or proximity that is not observed in nature. Engineered guide nucleic acids may comprise a first sequence and a second sequence that do not occur naturally together. For example, a guide nucleic acid may comprise a sequence of a naturally-occurring repeat region and a spacer region that is complementary to a naturally-occurring eukaryotic sequence. The guide nucleic acid may comprise a sequence of a repeat region that occurs naturally in an organism and a spacer region that does not occur naturally in that organism. A guide nucleic acid may comprise a first sequence that occurs in a first organism and a second sequence that occurs in a second organism, wherein the first organism and the second organism are different. The guide nucleic acid may comprise a third sequence disposed at a 3′ or 5′ end of the guide nucleic acid, or between the first and second sequences of the guide nucleic acid. In some embodiments, the guide nucleic acid comprises two heterologous sequences arranged in an order or proximity that is not observed in nature. In some embodiments, compositions, methods and systems described herein comprise a ribonucleotide complex comprising an effector protein and a guide nucleic acid that do not occur together in nature. Therefore, compositions, methods and systems described herein are not naturally occurring.

[0132] In some embodiments, compositions, methods and systems described herein comprise an effector protein that is similar to a naturally occurring effector protein. The effector protein may lack a portion of the naturally occurring effector protein. The effector protein may comprise a mutation relative to the naturally-occurring effector protein, wherein the mutation is not found in nature. The effector protein may also comprise at least one additional amino acid relative to the naturally-occurring effector protein. In some embodiments, the effector protein may comprise a heterologous polypeptide. For example, the effector protein may comprise an addition of a nuclear localization signal relative to the natural occurring effector protein. In some embodiments, a nucleotide sequence encoding the effector protein is codon optimized (e.g., for expression in a eukaryotic cell) relative to the naturally occurring sequence.

[0133] In some embodiments, compositions and systems described herein comprise an effector partner that is similar to a naturally occurring effector partner. The effector partner may lack a portion of the naturally occurring effector partner. The effector partner may comprise a mutation relative to the naturally-occurring effector partner, wherein the mutation is not found in nature. The effector partner may also comprise at least one additional amino acid relative to the naturally-occurring effector partner. In some embodiments, the effector partner may comprise a heterologous polypeptide. For example, the effector partner may comprise an addition of a nuclear localization signal relative to the natural occurring effector partner. In some embodiments, a nucleotide sequence encoding the effector partner is codon optimized (e.g., for expression in a eukaryotic cell) relative to the naturally occurring sequence.

### IV. POLYPEPTIDE SYSTEMS

[0134] Effector Proteins

[0135] Provided herein are compositions, systems, and methods comprising an effector protein or a use thereof. Effector proteins disclosed herein may cleave nucleic acids, including single stranded RNA (ssRNA), double stranded DNA (dsDNA), and single-stranded DNA (ssDNA). Effector proteins disclosed herein may provide cis cleavage activity, trans cleavage activity, nickase activity, nuclease activity, integrase activity, cointegrase activity or a combination thereof.

[0136] An effector protein provided herein interacts with a guide nucleic acid to form a complex. In some embodiments, the complex interacts with a target nucleic acid. In some embodiments, an interaction between the complex and the target nucleic acid comprises recognition of a PAM sequence by the effector protein, hybridization of the guide nucleic acid to the target nucleic acid, and/or modification of the target nucleic acid by the effector protein. In some embodiments, an ability of an effector protein to modify a target nucleic acid may be dependent upon the effector protein being bound to a guide nucleic acid and the guide nucleic acid being hybridized to a target nucleic acid. An effector protein may also recognize a protospacer adjacent motif (PAM) sequence present in the target nucleic acid. An effector protein may modify the target nucleic acid by cis cleavage and/or trans cleavage. The modification of the target nucleic acid generated by an effector protein may, as a non-limiting example, result in modulation of the expression of the target nucleic acid (e.g., increasing or decreasing expression of the nucleic acid) or modulation of the activity of a translation product of the target nucleic acid (e.g., inactivation of a protein binding to an RNA molecule or hybridization). An effector protein used herein may be a CRISPR-associated (“Cas”) protein.

[0137] An effector protein may function as a single protein, including a single protein that is capable of binding to a guide nucleic acid and modifying a target nucleic acid. Alternatively, an effector protein may function as part of a multiprotein complex, including, for example, a complex having two or more effector proteins, including two or more of the same effector proteins (e.g., dimer or multimer). An effector protein, when functioning in a multiprotein complex, may have only one functional activity (e.g., binding to a guide nucleic acid), while other effector proteins present in the multiprotein complex are capable of the other functional activity (e.g., modifying a target nucleic acid). In some embodiments, an effector protein, when functioning in a multiprotein complex, may have differing and/or complementary functional activity (e.g., transposase activity) to other effector proteins in the multiprotein complex (e.g., cointegrate activity). Multimeric complexes, and functions thereof, are described in further detail below. An effector protein may be a modified effector protein having increased modification activity and/or increased substrate binding activity (e.g., substrate selectivity, specificity, and/or affinity). Alternatively, or in addition, an effector protein may be a catalytically inactive effector protein having reduced modification activity or no modification activity.

[0138] TABLE 1 provides illustrative amino acid sequences of effector proteins that are useful in the compositions, systems and methods described herein.

[0139] In some embodiments, compositions, systems and methods described herein provided herein comprise an effector protein, wherein the amino acid sequence of the effector protein comprises at least about 200 contiguous amino acids or more of any one of the sequences recited in TABLE 1. In some embodiments, the amino acid sequence of an effector protein provided herein comprises at least about 200, at least about 220, at least about 240, at least about 260, at least about 280, at least about 300, at least about 320, at least about 340, at least about 360, at least about 380, at least about 400 contiguous amino acids, at least about 420 contiguous amino acids, at least about 440 contiguous amino acids, at least about 460 contiguous amino acids, at least about 480 contiguous amino acids, at least about 500 contiguous amino acids, at least about 520 contiguous amino acids, at least about 540 contiguous amino acids, at least about 560 contiguous amino acids, at least about 580 contiguous amino acids, at least about 600 contiguous amino acids, or more of any one of the sequences of TABLE 1.

[0140] In some embodiments, other than a truncation of the first 10 amino acids, 20 amino acids, 30 amino acids, 40 amino acids, 50 amino acids, 60 amino acids, 70 amino acids, 80 amino acids, 90 amino acids, or 100 amino acids, and/or a truncation of the last 10 amino acids, 20 amino acids, 30 amino acids, 40 amino acids, 50 amino acids, 60 amino acids, 70 amino acids, 80 amino acids, 90 amino acids, or 100 amino acids, the amino acid sequence of an effector protein provided herein comprises any one of the sequences of TABLE 1.

[0141] In some embodiments, compositions, systems, and methods provided herein comprise an effector protein, wherein the effector protein comprises an amino acid sequence that is at least 65% identical to any one of the sequences as set forth in TABLE 1. In some embodiments, an effector protein provided herein is at least 65%, at least 70%, at least 75%, at least 80%, at least 85%, at least 90%, at least 95%, at least 97%, or at least 98%, at least 99%, or 100% identical to any one of the sequences as set forth in TABLE 1. In some embodiments, compositions, systems, and methods provided herein comprise an effector protein and an engineered guide nucleic acid, wherein the effector protein comprises an amino acid sequence that is at least 65%, at least 70%, at least 75%, at least 80%, at least 85%, at least 90%, at least 95%, at least 98%, at least 99%, or 100% identical to any one of the sequences as set forth in TABLE 1.

[0142] In some embodiments, an effector protein provided herein comprises an amino acid sequence that is at least 65% identical to any one of the sequences as set forth in TABLE 1. In some embodiments, an effector protein provided herein comprises an amino acid sequence that is at least 70% identical to any one of the sequences as set forth in TABLE 1. In some embodiments, an effector protein provided herein comprises an amino acid sequence that is at least 75% identical to any one of the sequences as set forth in TABLE 1. In some embodiments, an effector protein provided herein comprises an amino acid sequence that is at least 80% identical to any one of the sequences as set forth in TABLE 1. In some embodiments, an effector protein provided herein comprises an amino acid sequence that is at least 85% identical to any one of the sequences as set forth in TABLE 1. In some embodiments, an effector protein provided herein comprises an amino acid sequence that is at least 90% identical to any one of the sequences as set forth in TABLE 1. In some embodiments, an effector protein provided herein comprises an amino acid sequence that is at least 95% identical to any one of the sequences as set forth in TABLE 1. In some embodiments, an effector protein provided herein comprises an amino acid sequence that is at least 98% identical to any one of the sequences as set forth in TABLE 1. In some embodiments, an effector protein provided herein comprises an amino acid sequence that is at least 99% identical to any one of the sequences as set forth in TABLE 1. In some embodiments, an effector protein provided herein comprises an amino acid sequence that is identical to any one of the sequences as set forth in TABLE 1.

[0143] In some embodiments, compositions, systems, and methods provided herein comprise an effector protein, wherein the effector protein comprises one or more amino acid alteration relative to any one of the sequences of TABLE 1 wherein the effector protein comprising one or more amino acid alterations is a variant of an effector protein described herein. It is understood that any reference to an effector protein herein also refers to an effector protein variant as described herein. In some embodiments, an effector protein provided herein comprises: 1 amino acid alteration, 2 amino acid alterations, 3 amino acid alterations, 4 amino acid alterations, 5 amino acid alterations, 6 amino acid alterations, 7 amino acid alterations, 8 amino acid alterations, 9 amino acid alterations, 10 amino acid alterations or more relative to any one of the sequences of TABLE 1.

[0144] In some embodiments, the one or more amino acid alteration is a conservative or non-conservative substitution. In some embodiments, an effector protein provided herein comprises: 1 conservative amino acid substitution, 2 conservative amino acid substitutions, 3 conservative amino acid substitutions, 4 conservative amino acid substitutions, 5 conservative amino acid substitutions, 6 conservative amino acid substitutions, 7 conservative amino acid substitutions, 8 conservative amino acid substitutions, 9 conservative amino acid substitutions, 10 conservative amino acid substitutions or more relative to any one of the sequences of TABLE 1. In some embodiments, an effector protein provided herein comprises: 1 non-conservative amino acid substitution, 2 non-conservative amino acid substitutions, 3 non-conservative amino acid substitutions, 4 non-conservative amino acid substitutions, 5 non-conservative amino acid substitutions, 6 non-conservative amino acid substitutions, 7 non-conservative amino acid substitutions, 8 non-conservative amino acid substitutions, 9 non-conservative amino acid substitutions, 10 non-conservative amino acid substitutions or more relative to any one of the sequences of TABLE 1.

[0145] In some embodiments, the one or more amino acid alterations may result in a change in activity of the effector protein relative to a naturally-occurring counterpart. For example, and as described in further detail below, the one or more amino acid alteration increases or decreases catalytic activity of the effector protein relative to a naturally-occurring counterpart. In some embodiments, the one or more amino acid alterations results in a catalytically inactive effector protein variant.

[0146] In some embodiments, described herein are methods and systems for identifying effector proteins for use herein. For example, in some embodiments, such methods for identifying an effector protein suitable for use herein may comprise the steps of identifying a CRISPR array in a database and selecting a sequence within about 150 bp, or about 150 bp to about 3.5 kb of a CRISPR Cas locus, wherein the identified sequence encodes an effector protein and one or more effector partners. In some embodiments, an identified sequence comprises one or more Open Reading Frames (ORFs) of which a first ORF encodes an effector protein and in some embodiments a second ORF encodes one or more effector partner. In embodiments where the identified sequence comprises two ORFs. In some embodiments where the identified sequence comprises two ORFs, the ORFs may overlap. In some embodiments, an effector partner is downstream of an effector protein. In some embodiments, an effector partner is upstream of an effector protein. In some embodiments, an identified sequence encodes an effector protein and two or more effector partners wherein a first effector partner is downstream of the effector protein and the second effector partner is upstream of the effector protein.

[0147] Effector Partners

[0148] Provided herein, are compositions, systems, and methods comprising an effector partner (e.g., partner polypeptide) or a use thereof. In some embodiments, an effector partner as described herein is referred to as a partner polypeptide. In some embodiments, effector partners described herein may have an activity that is synergistic, complementary, and/or additive to the activity of an effector protein. In some embodiments, effector partners described herein may have cointegrase activity or ATPase activity. In some embodiments, an effector partner comprises an amino acid sequence that is not 100% identical to an amino acid sequence of an effector protein described herein.

[0149] In some embodiments, compositions, systems, and methods described herein comprise one or more effector partners. In some embodiments, compositions, systems, and methods described herein comprise 1, 2, 3, 4, 5, 6, 7, 8, 9, 10 or more effector partners. In some embodiments, a genomic sequence encoding a naturally-occurring effector partner provided herein is found downstream of a genomic sequence encoding a naturally-occurring effector protein described herein. In some embodiments, an ORF of a genomic sequence encoding a naturally-occurring effector partner overlaps with an ORF of a genomic sequence encoding a naturally-occurring effector protein. In some embodiments, an ORF of a genomic sequence encoding a naturally-occurring effector partner does not overlap with an ORF of a genomic sequence encoding a naturally-occurring effector protein. In some embodiments, a genomic sequence encoding a naturally-occurring effector partner provided herein is found about 1 bp to about 50 bp downstream of a genomic sequence encoding a naturally-occurring effector protein described herein.

[0150] In some embodiments, a genomic sequence encoding a first naturally-occurring effector partner is found downstream of a genomic sequence encoding a naturally-occurring effector protein, and a genomic sequence encoding a second naturally-occurring effector partner is found downstream of the genomic sequence of the first naturally-occurring effector partner. In some embodiments, a genomic sequence encoding a second naturally-occurring effector partner provided herein is found about 1 bp to about 3.5 kb downstream of a genomic sequence encoding a first naturally-occurring effector partner described herein. In some embodiments, a genomic sequence encoding a first naturally-occurring effector partner is found downstream of a genomic sequence encoding a naturally-occurring effector protein, and a genomic sequence encoding a second naturally-occurring effector partner is found upstream of the genomic sequence of the naturally-occurring effector protein. In some embodiments, a genomic sequence encoding a second naturally-occurring effector partner provided herein is found about 1 bp to about 50 bp upstream of a genomic sequence encoding a first naturally-occurring effector protein described herein.

[0151] In some embodiments, compositions, systems, and methods described herein comprise one or more, two or more, three or more, four or more, five or more effector partners, or one or more nucleic acids encoding the one or more, two or more, three or more, four or more, five or more effector partners. In some embodiments, compositions, systems, and methods described herein comprise two or more effector partners, or one or more nucleic acids encoding the two or more effector partners. In some embodiments, compositions, systems, and methods described herein comprise three or more effector partners, or one or more nucleic acids encoding the three or more effector partners. In some embodiments, compositions, systems, and methods described herein comprise four or more effector partners, or one or more nucleic acids encoding the four or more effector partners. In some embodiments, compositions, systems, and methods described herein comprise five or more effector partners, or one or more nucleic acids encoding the five or more effector partners. In some embodiments, the one or more effector partners comprise an amino acid sequence that is at least 75% identical, at least 80% identical, at least 85% identical, at least 90% identical, at least 95% identical, or at least 100% identical to any one of the sequences set forth in TABLE 1.1.

[0152] In some embodiments, compositions, systems, and methods described herein comprise any one of the effector partners (e.g., partner polypeptide) described herein. In some embodiments, compositions described herein independently comprise any one of the effector partners described herein. In some embodiments, compositions comprise an effector partner which functions as a single protein. In some embodiments, a composition comprising an effector partner as described herein may be independently administered from a composition comprising an effector protein as described herein. In some embodiments, an independently administered composition comprising one or more effector partners as described herein, wherein each effector partner independently comprises an amino acid sequence that is at least 75% identical, at least 80% identical, at least 85% identical, at least 90% identical, at least 95% identical, or at least 100% identical to any one of the sequences set forth in TABLE 1.1. In some embodiments, an independently administered composition comprising one or more effector partners as described herein, wherein each effector partner independently imparts some function or activity. In some embodiments, compositions described herein comprise effector partner combinations wherein each effector partner independently imparts a function or activity.

[0153] In some embodiments, the effector partner imparts some function or activity that is not provided by an effector protein. In some embodiments, the effector partner imparts some function or activity that is synergistic, complementary, and/or additive to the function or activity provided by an effector protein. In some embodiments, the effector partner is capable of cleaving or modifying the target nucleic acid, a non-target nucleic acid, or both. In some embodiments, the effector partner provides cleavage activity, such as cis cleavage activity, trans cleavage activity, nickase activity, nuclease activity, other activity, or a combination thereof. In some embodiments, the effector partner comprises a RuvC domain capable of cleavage activity. In some embodiments, the effector partner cleaves nucleic acids, including single stranded RNA (ssRNA), double stranded DNA (dsDNA), and single-stranded DNA (ssDNA). In some embodiments, the effector partner cleaves the target nucleic acid at the target sequence or adjacent to the target sequence. In some embodiments, the effector partner cleaves the non-target nucleic acid.

[0154] In some embodiments, the effector partner complexes with a guide nucleic acid and the complex interacts with the target nucleic acid, a non-target nucleic acid, or both. In some embodiments, the interaction comprises one or more of: recognition of a protospacer adjacent motif (PAM) sequence within the target nucleic acid by the effector partner, hybridization of the guide nucleic acid to the target nucleic acid, modification of the target nucleic acid, and/or the non-target nucleic acid by the effector partner cleaves, or combinations thereof. In some embodiments, recognition of a PAM sequence within a target nucleic acid directs the modification activity.

[0155] In some embodiments, modification activity of an effector partner described herein comprises cleavage activity, binding activity, insertion activity, and substitution activity. In some embodiments, modification activity of an effector partner results in: cleavage of at least one strand of a target nucleic acid, deletion of one or more nucleotides of a target nucleic acid, insertion of one or more nucleotides into a target nucleic acid, substitution of one or more nucleotides of a target nucleic acid with an alternative nucleotide, more than one of the foregoing, or any combination thereof. In some embodiments, an ability of an effector partner to edit a target nucleic acid depends upon the effector partner being complexed with a guide nucleic acid, the guide nucleic acid being hybridized to a target sequence of the target nucleic acid, the distance between the target sequence and a PAM sequence, or combinations thereof. In some embodiments, an effector partner edits a target nucleic acid, wherein the target nucleic acid comprises a target strand and/or a non-target strand. In some embodiments, an effector partner is fused to one or more heterologous polypeptide, optionally wherein the heterologous polypeptide is a NLS.

[0156] An effector partner may function as a single protein. Alternatively, an effector partner may function as part of a multiprotein complex, including, for example, a complex having two or more effector partners, including two or more of the same effector partners (e.g., a dimer or multimer). An effector partner, when functioning in a multiprotein complex, may have only one functional activity, while other effector partners present in the multiprotein complex are capable of a complementary or differing functional activity. An effector partner may be a modified effector partner having increased modification activity and/or increased substrate binding activity (e.g., substrate selectivity, specificity, and/or affinity). Alternatively, or in addition, an effector partner may be a catalytically inactive effector partner having reduced modification activity or no modification activity.

[0157] TABLE 1.1 provides illustrative amino acid sequences of effector partners that are useful in the compositions, systems and methods described herein.

[0158] In some embodiments, compositions, systems, and methods described herein provided herein comprise an effector partner, wherein the amino acid sequence of the effector partner comprises at least about 200 contiguous amino acids or more of any one of the sequences recited in TABLE 1.1. In some embodiments, the amino acid sequence of an effector partner provided herein comprises at least about 200, at least about 220, at least about 240, at least about 260, at least about 280, at least about 300, at least about 320, at least about 340, at least about 360, at least about 380, at least about 400 contiguous amino acids, at least about 420 contiguous amino acids, at least about 440 contiguous amino acids, at least about 460 contiguous amino acids, at least about 480 contiguous amino acids, at least about 500 contiguous amino acids, at least about 520 contiguous amino acids, at least about 540 contiguous amino acids, at least about 560 contiguous amino acids, at least about 580 contiguous amino acids, at least about 600 contiguous amino acids, or more of any one of the sequences of TABLE 1.1.

[0159] In some embodiments, other than a truncation of the first 10 amino acids, 20 amino acids, 30 amino acids, 40 amino acids, 50 amino acids, 60 amino acids, 70 amino acids, 80 amino acids, 90 amino acids, or 100 amino acids, and/or a truncation of the last 10 amino acids, 20 amino acids, 30 amino acids, 40 amino acids, 50 amino acids, 60 amino acids, 70 amino acids, 80 amino acids, 90 amino acids, or 100 amino acids, the amino acid sequence of an effector partner provided herein comprises any one of the sequences of TABLE 1.1.

[0160] In some embodiments, compositions, systems, and methods provided herein comprise an effector partner, wherein the effector partner comprises an amino acid sequence that is at least 65% identical to any one of the sequences as set forth in TABLE 1.1. In some embodiments, an effector partner provided herein is at least 65%, at least 70%, at least 75%, at least 80%, at least 85%, at least 90%, at least 95%, at least 97%, or at least 98%, at least 99%, or 100% identical to any one of the sequences as set forth in TABLE 1.1. In some embodiments, compositions, systems, and methods provided herein comprise an effector partner and an engineered guide nucleic acid, wherein the effector partner comprises an amino acid sequence that is at least 65%, at least 70%, at least 75%, at least 80%, at least 85%, at least 90%, at least 95%, at least 98%, at least 99%, or 100% identical to any one of the sequences as set forth in TABLE 1.1.

[0161] In some embodiments, an effector partner provided herein comprises an amino acid sequence that is at least 65% identical to any one of the sequences as set forth in TABLE 1.1. In some embodiments, an effector partner provided herein comprises an amino acid sequence that is at least 70% identical to any one of the sequences as set forth in TABLE 1.1. In some embodiments, an effector partner provided herein comprises an amino acid sequence that is at least 75% identical to any one of the sequences as set forth in TABLE 1.1. In some embodiments, an effector partner provided herein comprises an amino acid sequence that is at least 80% identical to any one of the sequences as set forth in TABLE 1.1. In some embodiments, an effector partner provided herein comprises an amino acid sequence that is at least 85% identical to any one of the sequences as set forth in TABLE 1.1. In some embodiments, an effector partner provided herein comprises an amino acid sequence that is at least 90% identical to any one of the sequences as set forth in TABLE 1.1. In some embodiments, an effector partner provided herein comprises an amino acid sequence that is at least 95% identical to any one of the sequences as set forth in TABLE 1.1. In some embodiments, an effector partner provided herein comprises an amino acid sequence that is at least 98% identical to any one of the sequences as set forth in TABLE 1.1. In some embodiments, an effector partner provided herein comprises an amino acid sequence that is at least 99% identical to any one of the sequences as set forth in TABLE 1.1. In some embodiments, an effector partner provided herein comprises an amino acid sequence that is identical to any one of the sequences as set forth in TABLE 1.1.

[0162] In some embodiments, compositions, systems, and methods provided herein comprise an effector partner, wherein the effector partner comprises one or more amino acid alteration relative to any one of the sequences of TABLE 1.1 wherein the effector partner comprising one or more amino acid alterations is a variant of an effector partner described herein. It is understood that any reference to an effector partner herein also refers to an effector partner variant as described herein. In some embodiments, an effector partner provided herein comprises: 1 amino acid alteration, 2 amino acid alterations, 3 amino acid alterations, 4 amino acid alterations, 5 amino acid alterations, 6 amino acid alterations, 7 amino acid alterations, 8 amino acid alterations, 9 amino acid alterations, 10 amino acid alterations or more relative to any one of the sequences of TABLE 1.1.

[0163] In some embodiments, the one or more amino acid alteration is a conservative or non-conservative substitution. In some embodiments, an effector partner provided herein comprises: 1 conservative amino acid substitution, 2 conservative amino acid substitutions, 3 conservative amino acid substitutions, 4 conservative amino acid substitutions, 5 conservative amino acid substitutions, 6 conservative amino acid substitutions, 7 conservative amino acid substitutions, 8 conservative amino acid substitutions, 9 conservative amino acid substitutions, 10 conservative amino acid substitutions or more relative to any one of the sequences of TABLE 1.1. In some embodiments, an effector partner provided herein comprises: 1 non-conservative amino acid substitution, 2 non-conservative amino acid substitutions, 3 non-conservative amino acid substitutions, 4 non-conservative amino acid substitutions, 5 non-conservative amino acid substitutions, 6 non-conservative amino acid substitutions, 7 non-conservative amino acid substitutions, 8 non-conservative amino acid substitutions, 9 non-conservative amino acid substitutions, 10 non-conservative amino acid substitutions or more relative to any one of the sequences of TABLE 1.1.

[0164] In some embodiments, the one or more amino acid alterations may result in a change in activity of the effector partner relative to a naturally-occurring counterpart. For example, and as described in further detail herein, the one or more amino acid alteration increases or decreases catalytic activity of the effector partner relative to a naturally-occurring counterpart. In some embodiments, the one or more amino acid alterations results in a catalytically inactive effector partner variant.

[0165] Effector Protein and Effector Partner Complexes

[0166] Compositions, systems, and methods of the present disclosure may comprise a complex or uses thereof, wherein the complex comprises one or more effector proteins and/or one or more effector partners, or combinations thereof. In some embodiments, the complex comprises at least one effector protein, and one or more effector partner. In some embodiments, the complex comprises at least one effector protein, and two effector partners. In some embodiments, the complex comprises at least one effector protein, and two, three, four or more effector partners. In some embodiments, the complex comprises two, three, four or more effector proteins, and two, three, four or more effector partners. In some embodiments, each effector protein of the complex independently comprises an amino acid sequence with at least 65%, at least 70%, at least 75%, at least 80%, at least 85%, at least 90%, at least 95% or 100% identity to any one of the sequences of TABLE 1 and each effector partner of the complex independently comprises an amino acid sequence with at least 65%, at least 70%, at least 75%, at least 80%, at least 85%, at least 90%, at least 95% or 100% identity to any one of the sequences of TABLE 1.1. The complex may comprise enhanced activity relative to the activity of any one of its effector proteins and/or effector partners alone. For example, the complex comprising one or more of a effector protein and/or effector partner (e.g., in dimeric form) may comprise greater nucleic acid binding affinity, nuclease activity, integrase activity, cointegrase activity, and the like than that of any of the proteins provided in monomeric form. It is understood that when discussing the use of an effector protein and an effector partner in compositions, systems, and methods provided herein, the complex form is also described. It is also understood that when discussing the use of more than one effector partner in compositions, systems, and methods provided herein, the complex form is also described.

[0167] Engineered Proteins

[0168] In some embodiments, effector proteins and/or effector partners described herein are modified (also referred to as an engineered protein or an engineered partner, respectively). In some embodiments, effector proteins disclosed herein are engineered proteins. In some embodiments, effector partners disclosed herein are engineered partners. Unless otherwise indicated, reference to effector proteins throughout the present disclosure include engineered proteins thereof. Similarly, unless otherwise indicated, reference to effector partners throughout the present disclosure include engineered partners thereof. Engineered proteins are not identical to a naturally-occurring protein. In some embodiments, an engineered protein may comprise a modified form of a naturally-occurring protein. Engineered partners are not identical to a naturally-occurring protein. In some embodiments, an engineered partner may comprise a modified form of a naturally-occurring protein.

[0169] For example, effector proteins and/or effector partners described herein may be modified with the addition of one or more heterologous peptides or heterologous polypeptides (referred to collectively herein as a heterologous polypeptide). In certain embodiments, an effector protein and/or effector partners modified with the addition of one or more heterologous peptides or heterologous polypeptides may be referred to herein as a fusion protein. Such fusion proteins are described herein and throughout.

[0170] In some embodiments, a heterologous peptide or heterologous polypeptide comprises a subcellular localization signal. In some embodiments, a subcellular localization signal may be a nuclear localization signal (NLS) for targeting the effector protein and/or effector partner to the nucleus. Non-limiting examples of NLS sequences are set forth in TABLE 2. In some embodiments, the subcellular localization signal is a nuclear export signal (NES), a sequence to keep an effector protein and/or effector partner retained in the cytoplasm, a mitochondrial localization signal for targeting to the mitochondria, a chloroplast localization signal for targeting to a chloroplast, an ER retention signal, and the like. In some embodiments, an effector protein and/or effector partner described herein is not modified with a subcellular localization signal so that the polypeptide is not targeted to the nucleus, which may be advantageous depending on the circumstance (e.g., when the target nucleic acid is an RNA that is present in the cytosol).

[0171] In some embodiments, a heterologous peptide or heterologous polypeptide comprises a chloroplast transit peptide (CTP), also referred to as a chloroplast localization signal or a plastid transit peptide, which targets the effector protein and/or effector partner to a chloroplast. Chromosomal transgenes from bacterial sources may require a sequence encoding a CTP sequence fused to a sequence encoding an expressed protein (e.g., the effector protein and/or effector partner) if the expressed protein is to be compartmentalized in the plant plastid (e.g., chloroplast). The CTP may be removed in a processing step during translocation into the plastid. Accordingly, localization of an effector protein and/or effector partner to a chloroplast is often accomplished by means of operably linking a polynucleotide sequence encoding a CTP sequence to the 5′ region of a polynucleotide encoding the exogenous protein.

[0172] In some embodiments, the heterologous polypeptide is an endosomal escape peptide (EEP). An EEP is an agent that quickly disrupts the endosome in order to minimize the amount of time that a delivered molecule, such an effector protein and/or effector partner, spends in the endosome-like environment, and to avoid getting trapped in the endosomal vesicles and degraded in the lysosomal compartment.

[0173] In some embodiments, the heterologous polypeptide is a cell penetrating peptide (CPP), also known as a Protein Transduction Domain (PTD). A CPP or PTD is a polypeptide, polynucleotide, carbohydrate, or organic or inorganic compound that facilitates traversing a lipid bilayer, micelle, cell membrane, organelle membrane, or vesicle membrane.

[0174] Further suitable heterologous polypeptides include, but are not limited to, proteins (or fragments/domains thereof) that are boundary elements (e.g., CTCF), proteins and fragments thereof that provide periphery recruitment (e.g., Lamin A, Lamin B, etc.), and protein docking elements (e.g., FKBP/FRB, Pill/Abyl, etc.).

[0175] In some embodiments, a heterologous peptide or heterologous polypeptide comprises a protein tag. In some instances, the protein tag is referred to as purification tag or a fluorescent protein. The protein tag may be detectable for use in detection of the effector protein and/or effector partner and/or purification of the effector protein and/or effector partner. Accordingly, in some embodiments, compositions, systems and methods comprise a protein tag or use thereof. Any suitable protein tag may be used depending on the purpose of its use. Non-limiting examples of protein tags include a fluorescent protein, a histidine tag, e.g., a 6×His tag (SEQ ID NO: 1009); a hemagglutinin (HA) tag; a FLAG tag; a Myc tag; and maltose binding protein (MBP). In some instances, the protein tag is a portion of MBP that can be detected and/or purified. Non-limiting examples of fluorescent proteins include green fluorescent protein (GFP), yellow fluorescent protein (YFP), red fluorescent protein (RFP), cyan fluorescent protein (CFP), mCherry, and tdTomato.

[0176] A heterologous polypeptide may be located at or near the amino terminus (N-terminus) of the effector protein and/or effector partner disclosed herein. A heterologous polypeptide may be located at or near the carboxy terminus (C-terminus) of the effector proteins and/or effector partners disclosed herein. In some embodiments, a heterologous polypeptide is located internally in an effector protein and/or effector partner described herein (i.e., is not at the N- or C-terminus of an effector protein and/or effector partner described herein) at a suitable insertion site.

[0177] In some embodiments, a vector encodes the effector proteins and/or effector partners described herein, wherein the vector or vector systems disclosed herein comprises one or more heterologous polypeptides, such as about or more than about 1, 2, 3, 4, 5, 6, 7, 8, 9, 10, or more heterologous polypeptides. In some embodiments, an effector protein and/or effector partner described herein comprises 1, 2, 3, 4, 5, 6, 7, 8, 9, 10, or more heterologous polypeptides at or near the N-terminus, 1, 2, 3, 4, 5, 6, 7, 8, 9, 10, or more heterologous polypeptides at or near the C-terminus, or a combination of these (e.g. one or more heterologous polypeptides at the amino-terminus and one or more heterologous polypeptides at the carboxy terminus). When more than one heterologous polypeptide is present, each may be selected independently of the others, such that a single heterologous polypeptide may be present in more than one copy and/or in combination with one or more other heterologous polypeptides present in one or more copies. In some embodiments, a heterologous polypeptide is considered near the N- or C-terminus when the nearest amino acid of the heterologous polypeptide is within about 1, 2, 3, 4, 5, 10, 15, 20, 25, 30, 40, 50, or more amino acids along the polypeptide chain from the N- or C-terminus.

[0178] In some embodiments, effector proteins and/or effector partners described herein are encoded by a codon optimized nucleic acid. In some embodiments, a nucleic acid sequence encoding an effector protein and/or effector partner described herein, is codon optimized. In some embodiments, effector proteins and/or effector partners described herein may be codon optimized for expression in a specific cell, for example, a bacterial cell, a plant cell, a eukaryotic cell, an animal cell, a mammalian cell, or a human cell. In some embodiments, the effector protein and/or effector partner is codon optimized for a human cell. It is understood that when describing coding sequences of polypeptides described herein, said coding sequences do not necessarily require a codon encoding a N-terminal Methionine (M) or a Valine (V) as described for the effector proteins described herein. One skilled in the art would understand that a start codon could be replaced or substituted with a start codon that encodes for an amino acid residue sufficient for initiating translation in a host cell. In some embodiments, when a modifying heterologous peptide, such as a fusion partner protein, protein tag or NLS, is located at the N terminus of the effector protein, a start codon for the heterologous peptide serves as a start codon for the effector protein as well. Thus, the natural start codon encoding an amino acid residue sufficient for initiating translation (e.g., Methionine (M) or a Valine (V)) of the effector protein may be removed or absent.

[0179] In another example, engineered proteins and/or engineered partners may comprise one or more modifications that may provide altered activity as compared to a naturally-occurring counterpart (e.g., a naturally-occurring nuclease, nickase, transposase, cointegrase, ATPase, etc. which may be a naturally-occurring effector protein and/or effector partner). In some embodiments, activity (e.g., nickase, nuclease, binding, transposase, cointegrase, ATPase, etc., activity) of engineered proteins and/or engineered partners described herein may be measured relative to a WT effector protein and/or effector partner or compositions containing the same in a cleavage assay.

[0180] For example, engineered proteins and/or engineered partners may comprise one or more modifications that may provide increased activity as compared to a naturally-occurring counterpart. For example, engineered proteins and/or engineered partners may provide increased catalytic activity (e.g., nickase, nuclease, binding, transposase or transposase-like, cointegrase or cointegrase-like, or ATPase activity) as compared to a naturally-occurring counterpart. Engineered proteins and/or engineered partners may provide enhanced nucleic acid binding activity (e.g., enhanced binding of a guide nucleic acid, donor nucleic acid, and/or target nucleic acid) as compared to a naturally-occurring counterpart. An engineered protein may have a 1%, 5%, 10%, 20%, 30%, 40%, 50%, 60%, 70%, 80%, 90%, 100%, 120%, 140%, 160%, 180%, 200%, or more, increase of the activity of a naturally-occurring counterpart. An engineered partner may have a 1%, 5%, 10%, 20%, 30%, 40%, 50%, 60%, 70%, 80%, 90%, 100%, 120%, 140%, 160%, 180%, 200%, or more, increase of the activity of a naturally-occurring counterpart.

[0181] Alternatively, engineered proteins and/or engineered partners may comprise modifications, that reduces the activity of the engineered protein relative to a naturally occurring nuclease, nickase, transposase, cointegrase, and/or ATPase. An engineered protein may have a 100%, 90%, 80%, 70%, 60%, 50%, 40%, 30%, 20%, 10%, 5%, 1%, or less, decrease of the activity of a naturally occurring counterpart. An engineered partner may have a 100%, 90%, 80%, 70%, 60%, 50%, 40%, 30%, 20%, 10%, 5%, 1%, or less, decrease of the activity of a naturally occurring counterpart. Decreased activity may be decreased catalytic activity (e.g., nickase, nuclease, binding, transposase or transposase-like, cointegrase or cointegrase-like, or ATPase activity) as compared to a naturally-occurring counterpart.

[0182] An engineered protein that has decreased catalytic activity may be referred to as catalytically or enzymatically inactive, catalytically or enzymatically dead, as a dead protein or a dCas protein. In some embodiments, such a protein may comprise an enzymatically inactive domain (e.g. inactive nuclease domain). For example, a nuclease domain (e.g., RuvC domain) of an effector protein may be deleted or mutated relative to a wild type counterpart so that it is no longer functional or comprises reduced nuclease activity. In some embodiments, a catalytically inactive effector protein may bind to a guide nucleic acid and/or a target nucleic acid but does not cleave the target nucleic acid. In some embodiments, a catalytically inactive effector protein may associate with a guide nucleic acid to activate or repress transcription of a target nucleic acid. In some embodiments, a catalytically inactive effector protein is fused to a fusion partner protein that confers an alternative activity to an effector protein activity. Such fusion proteins are described herein and throughout.

[0183] Fusion Partners

[0184] In some embodiments, compositions, systems, and methods comprise a fusion partner, a fusion protein, or uses thereof. In some embodiments, a fusion partner comprises a polypeptide or peptide that is fused or linked to an effector protein or an effector partner. In some embodiments, an effector protein is a fusion protein, wherein the fusion protein comprises an effector protein described herein (e.g., wherein the effector protein comprises an amino acid sequence that is at least 65% identical to any one of the sequences set forth in TABLE 1) and a fusion partner. In some embodiments, an effector partner is a fusion protein, wherein the fusion protein comprises an effector partner described herein (e.g., wherein the effector partner comprises an amino acid sequence that is at least 65% identical to any one of the sequences set forth in TABLE 1.1) and a fusion partner. Unless otherwise indicated, reference to effector proteins and/or effector partners throughout the present disclosure include fusion proteins thereof.

[0185] The fusion partner generally imparts some function or activity to the fusion protein that is not provided by the effector protein and/or effector partner. Such activities may include nuclease activity, methyltransferase activity, demethylase activity, DNA repair activity, DNA damage activity, deamination activity, dismutase activity, alkylation activity, depurination activity, oxidation activity, dimer forming activity (e.g., pyrimidine dimer forming activity), integrase activity, transposase activity, recombinase activity, polymerase activity, ligase activity, helicase activity, photolyase activity, glycosylase activity, acetyltransferase activity, deacetylase activity, kinase activity, phosphatase activity, ubiquitin ligase activity, deubiquitinating activity, adenylation activity, deadenylation activity, SUMOylating activity, deSUMOylating activity, ribosylation activity, deribosylation activity, myristoylation activity or demyristoylation activity) that modifies a polypeptide associated with target nucleic acid (e.g., a histone), and/or signaling activity.

[0186] In some embodiments, a fusion partner may provide signaling activity. In some embodiments, a fusion partner may inhibit or promote the formation of multimeric complex of an effector protein and/or effector partner. In an additional example, the fusion partner may directly or indirectly modify a target nucleic acid. Modifications may be of a nucleobase, nucleotide, or nucleotide sequence of a target nucleic acid. In some embodiments, the fusion partner may interact with additional proteins, or functional fragments thereof, to make modifications to a target nucleic acid. In other embodiments, the fusion partner may modify proteins associated with a target nucleic acid. In some embodiments, a fusion partner may modulate transcription (e.g., inhibits transcription, increases transcription) of a target nucleic acid. In yet another example, a fusion partner may directly or indirectly inhibit, reduce, activate or increase expression of a target nucleic acid.

[0187] Linkers

[0188] In some embodiments, fusion proteins comprise an effector protein, or an effector partner, or both, and a fusion partner. The effector protein, or an effector partner, or both, may be fused or linked to the fusion partner. The terms “fused” and “linked” may be used interchangeably. In some instances, the effector protein, or an effector partner, or both, and the fusion partner are directly linked via a covalent bond. In some instances, effector proteins, or effector partners, or both, and fusion partners are connected via a linker.

[0189] The linker may comprise or consist of a covalent bond. The linker may comprise or consist of a chemical group. In some embodiments, the linker comprises an amino acid. In some embodiments, a linker comprises a bond or molecule that links a first polypeptide to a second polypeptide. In some embodiments, a peptide linker comprises at least two amino acids linked by an amide bond. In general, the linker connects a terminus of the effector protein or effector partner to a terminus of the fusion partner. In some embodiments, the carboxy terminus of the effector protein or effector partner is linked to the amino terminus of the fusion partner. In some embodiments, the carboxy terminus of the fusion partner is linked to the amino terminus of the effector protein or effector partner.

[0190] In some embodiments, a terminus of the effector protein or effector partner is linked to a terminus of the fusion partner through an amide bond. In some embodiments, a terminus of the effector protein or effector partner is linked to a terminus of the fusion partner through a peptide bond. In some instances, linkers comprise an amino acid. In some embodiments, linkers comprise a peptide. In some embodiments, an effector protein or effector partner is coupled to a fusion partner via a linker protein. The linker protein may have any of a variety of amino acid sequences. A linker protein may comprise a region of rigidity (e.g., beta sheet, alpha helix), a region of flexibility, or any combination thereof. In some embodiments, the linker comprises small amino acids, such as glycine and alanine, that impart high degrees of flexibility. The ordinarily skilled artisan will recognize that design of a peptide conjugated to any desired element may include linkers that are all or partially flexible, such that the linker may include a flexible linker as well as one or more portions that confer less flexible structure. Suitable linkers include proteins of 4 linked amino acids to 40 linked amino acids in length, or between 4 linked amino acids and 25 linked amino acids in length. In some embodiments, when a linked amino acids is described herein, it may refer to at least two amino acids linked by an amide bond.

[0191] These linkers may be produced by using synthetic, linker-encoding oligonucleotides to couple the proteins, or may be encoded by a nucleic acid sequence encoding a fusion protein (e.g., an effector protein coupled to a fusion partner). Examples of linker proteins include glycine polymers (G)n, glycine-serine polymers (including, for example, (GS)n, GSGGSn (SEQ ID NO: 1010), GGSGGSn (SEQ ID NO: 1011), and GGGSn (SEQ ID NO: 1012), where n is an integer of at least one), glycine-alanine polymers, and alanine-serine polymers. Exemplary linkers may comprise amino acid sequences including, but not limited to, GGSG (SEQ ID NO: 1013), GGSGG (SEQ ID NO: 1014), GSGSG (SEQ ID NO: 1015), GSGGG (SEQ ID NO: 1016), GGGSG (SEQ ID NO: 1017), and GSSSG (SEQ ID NO: 1018).

[0192] In some instances, linkers do not comprise an amino acid. In some instances, linkers do not comprise a peptide. In some instances, linkers comprise a nucleotide, a polynucleotide, a polymer, or a lipid.

[0193] Synthesis, Isolation and Assaying

[0194] Effector proteins and effector partners of the present disclosure of the present disclosure may be synthesized, using any suitable method. Effector proteins and effector partners of the present disclosure may be produced in vitro or by eukaryotic cells or by prokaryotic cells. Effector proteins and effector partners may be further processed by unfolding, e.g. heat denaturation, dithiothreitol reduction, etc. and may be further refolded, using any suitable method.

[0195] Any suitable method of generating and assaying the effector proteins and/or effector partners described herein may have used in the present disclosure. Such methods include, but are not limited to, site-directed mutagenesis, random mutagenesis, combinatorial libraries, and other mutagenesis methods described herein (see, e.g., Sambrook et al., Molecular Cloning. A Laboratory Manual, Third Ed., Cold Spring Harbor Laboratory, New York (2001); Ausubel et al., Current Protocols in Molecular Biology, John Wiley and Sons, Baltimore, M D (1999); Gillman et al., Directed Evolution Library Creation: Methods and Protocols (Methods in Molecular Biology) Springer, 2nd ed (2014)). One non-limiting example of a method for preparing an effector protein is to express recombinant nucleic acids encoding the effector protein and/or effector partners in a suitable microbial organism, such as a bacterial cell, a yeast cell, or other suitable cell, using methods well known in the art. Exemplary methods are also described in the Examples provided herein.

[0196] In some embodiments, an effector protein provided herein is an isolated effector protein. In some embodiments, effector proteins described herein may be isolated and purified for use in compositions, systems, and/or methods described herein. Similarly, an effector partner provided herein is an isolated effector partner. In some embodiments, effector partners described herein may be isolated and purified for use in compositions, systems, and/or methods described herein. Methods described here may include the step of isolating effector proteins and/or effector partners described herein. Any suitable method to provide isolated effector proteins and/or effector partners described herein may be used in the present disclosure, for example, recombinant expression systems, precipitation, gel filtration, ion-exchange, reverse-phase and affinity chromatography, and the like. Other well-known methods are described in Deutscher et al., Guide to Protein Purification: Methods in Enzymology, Vol. 182, (Academic Press, (1990)). Alternatively, the isolated polypeptides of the present disclosure may be obtained using well-known recombinant methods (see, e.g., Sambrook et al., Molecular Cloning: A Laboratory Manual, Third Ed., Cold Spring Harbor Laboratory, New York (2001); and Ausubel et al., Current Protocols in Molecular Biology, John Wiley and Sons, Baltimore, MD (1999)). The methods and conditions for biochemical purification of a polypeptide described herein may be chosen by those skilled in the art, and purification monitored, for example, by a functional assay.

[0197] For example, compositions and/or systems described herein may further comprise a purification tag that may be attached to an effector protein, or a nucleic acid encoding for a purification tag that may be attached to a nucleic acid encoding for an effector protein as described herein. In another example, compositions and/or systems described herein may further comprise a purification tag that may be attached to an effector partner, or a nucleic acid encoding for a purification tag that may be attached to a nucleic acid encoding for an effector partner as described herein. A purification tag, as used herein, may be an amino acid sequence which may attach or bind with high affinity to a separation substrate and assist in isolating the protein of interest from its environment, which may be its biological source, such as a cell lysate. Attachment of the purification tag may be at the N or C terminus of the effector protein and/or effector partner. Furthermore, an amino acid sequence recognized by a protease or a nucleic acid encoding for an amino acid sequence recognized by a protease, such as TEV protease or the HRV3C protease may be inserted between the purification tag and the effector protein and/or effector partner, such that biochemical cleavage of the sequence with the protease after initial purification liberates the purification tag. Purification and/or isolation may be through high performance liquid chromatography (HPLC), exclusion chromatography, gel electrophoresis, affinity chromatography, or other purification technique. Examples of purification tags are as described herein.

[0198] In some embodiments, effector proteins and/or effector partners described herein are isolated from cell lysate. In some embodiments, the compositions described herein may comprise 20% or more by weight, 75% or more by weight, 95% or more by weight, or 99.5% or more by weight of an effector protein and/or effector partner, related to the method of preparation of compositions described herein and its purification thereof, wherein percentages may be upon total protein content in relation to contaminants. Thus, in some embodiments, an effector protein and/or effector partner described herein is at least 80% pure, at least 85% pure, at least 90% pure, at least 95% pure, at least 98% pure, or at least 99% pure (e.g., free of contaminants, non-engineered polypeptide proteins or other macromolecules, etc.).

[0199] Protospacer Adjacent Motif (PAM)

[0200] Effector proteins and/or effector partners of the present disclosure may cleave or nick a target nucleic acid within or near a protospacer adjacent motif (PAM) sequence of the target nucleic acid. In some embodiments, cleavage occurs within 1, 2, 3, 4, 5, 6, 7, 8, 9, 10, 15, 20, 25, 30, 35, 40, 45, or 50 nucleotides of a 5′ or 3′ terminus of a PAM sequence. In some embodiments, effector proteins and/or effector partners described herein recognize a PAM sequence, wherein the effector proteins and/or effector partner binds to a sequence adjacent to the PAM. In some embodiments, recognizing a PAM sequence comprises binding to a sequence adjacent to the PAM. In some embodiments, a target nucleic acid comprises a target sequence that is adjacent to a PAM sequence. In some instances, effector protein and/or effector partners do not require a PAM to bind and/or cleave a target nucleic acid.

### V. NUCLEIC ACID SYSTEMS

[0201] Guide Nucleic Acids

[0202] The compositions, systems, and methods of the present disclosure may comprise a guide nucleic acid or a use thereof. Unless otherwise indicated, compositions, systems and methods comprising guide nucleic acids or uses thereof, as described herein and throughout, include DNA molecules, such as expression vectors, that encode a guide nucleic acid.

[0203] A guide nucleic acid may comprise a naturally occurring nucleotide sequence. A guide nucleic acid may comprise a non-naturally nucleotide occurring sequence, wherein the nucleotide sequence of the guide nucleic acid, or any portion thereof, may be different from a nucleotide sequence of a naturally occurring guide nucleic acid. A guide nucleic acid of the present disclosure comprises one or more of the following: a) a single nucleic acid molecule; b) a DNA base; c) an RNA base; d) a modified base; e) a modified sugar; f) a modified backbone; and the like. Modifications are described herein and throughout the present disclosure (e.g., in the section entitled “Engineered Modifications”). A guide nucleic acid may be chemically synthesized or recombinantly produced by any suitable methods. Guide nucleic acids and portions thereof may be found in or identified from a CRISPR array present in the genome of a host organism or cell.

[0204] The guide nucleic acid may also form complexes as described through herein. For example, a guide nucleic acid may hybridize to another nucleic acid, such target nucleic acid, or a portion thereof. In some embodiments, a complex of two nucleic acids may be a nucleic acid duplex. In another example, a guide nucleic acid may complex with an effector protein. In such embodiments, a guide nucleic acid-effector protein complex may be described herein as an RNP. In some embodiments, when in a complex, at least a portion of the complex may bind, recognize, and/or hybridize to a target nucleic acid. For example, when a guide nucleic acid and an effector protein are complexed to form an RNP, at least a portion of the RNP may bind, recognize, and/or hybridize to a target nucleic acid. Those skilled in the art in reading the below specific examples of guide nucleic acids as used in RNPs described herein, will understand that in some embodiments, a RNP may hybridize to one or more target sequences in a target nucleic acid, thereby allowing the RNP to modify and/or recognize a target nucleic acid or sequence contained therein or to modify and/or recognize non-target sequences depending on the guide nucleic acid, and in some embodiments, the effector protein, used.

[0205] In some embodiments, the compositions, systems, and methods of the present disclosure comprise two or more guide nucleic acids (e.g., 2, 3, 4, 5, 6, 7, 9, 10 or more guide nucleic acids), and/or uses thereof. Multiple guide nucleic acids may target an effector protein to different locations in the target nucleic acid by hybridizing to different locations within the target nucleic acid. A first guide nucleic acid may bind a first loci of a target nucleic acid and a second guide nucleic acid may bind a second loci of the target nucleic acid. The first loci and the second loci of the target nucleic acid may be located at least 1, at least 10, at least 20, at least 30, at least 40, at least 50, at least 60, at least 70, at least 80, at least 90 or at least 100 nucleotides apart. The first loci and the second loci of the target nucleic acid may be located between 100 and 200, 200 and 300, 300 and 400, 400 and 500, 500 and 600, 600 and 700, 700 and 800, 800 and 900 or 900 and 1000 nucleotides apart.

[0206] In some instances, the first loci and/or the second loci of the target nucleic acid are located in an intron of a gene, an exon of a gene, or combinations thereof. In some instances, the first loci and/or the second loci of the target nucleic acid are located in an intron of a gene. In some embodiments, the first loci and/or the second loci of the target nucleic acid are located in an exon of a gene. In some instances, the first loci and/or the second loci of the target nucleic acid span an exon-intron junction of a gene. In some instances, the first loci and/or the second loci of the target nucleic acid are located on either side of an exon and cutting at both sites results in deletion of the exon. In some embodiments, composition, systems and methods comprise a donor nucleic acid that may be inserted in replacement of a deleted or cleaved sequence of the target nucleic acid. In some embodiments, compositions, systems and methods comprising multiple guide nucleic acids or uses thereof comprise one or more effector proteins and/or one or more effector partners, or combinations thereof, wherein the effector proteins may be identical, non-identical, or combinations thereof.

[0207] In some embodiments, a guide nucleic acid comprises about: 10, 11, 12, 13, 14, 15, 16, 17, 18, 19, 20, 21, 22, 23, 24, 25, 26, 27, 28, 29, 30, 31, 32, 33, 34, 35, 36, 37, 38, 39, 40, 41, 42, 43, 44, 45, 46, 47, 48, 49, 50, 51, 52, 53, 54, 55, 56, 57, 58, 59, or 60 linked nucleotides. In general, a guide nucleic acid comprises at least: 10, 15, 20, 25, 30, 35, 40, 45, 50, 55, 60 linked nucleotides. In some embodiments, the guide nucleic acid has about 10 to about 60, about 20 to about 50, or about 30 to about 40 linked nucleotides.

[0208] A guide nucleic acid may comprise: a first region (FR) that is not complementary to a target nucleic acid and a second region (SR) is, at least partially, complementary to a portion of a target nucleic acid. An FR may be located 5′ to a SR (FR-SR). Alternatively, a SR is located 5′ to FR (SR-FR). An FR and a SR may be coupled or linked. In some embodiments, a FR may interact with an effector protein as described herein (e.g., TABLE 1). In some embodiments, interaction between a FR and an effector protein may be a binding interaction. In some embodiments, a binding interaction may be non-covalent binding. In some embodiments, a FR comprises one or more of a handle sequence, an intermediary RNA sequence, a repeat sequence, a linker or combinations thereof.

[0209] In some embodiments, a SR is at least partially, complementary to an equal length of a portion of a target nucleic acid (e.g., a target sequence). In some embodiments, a SR may, at least partially, hybridize to an equal length of a portion of a target nucleic acid (e.g., a target sequence). In some embodiments, a SR is complementary with and hybridizes to an equal length portion of a target sequence of a target nucleic acid.

[0210] The conditions appropriate for hybridization between two nucleotide sequences depend on the length of the sequence and the degree of complementarity, variables which are well known in the art. For hybridizations between nucleic acids with short stretches of complementarity (e.g. complementarity over 35 or less, 30 or less, 25 or less, 22 or less, 20 or less, or 18 or less nucleotides) the position of mismatches may become important (see Sambrook et al., supra, 11.7-11.8). Typically, the length for a hybridizable nucleic acid is 8 nucleotides or more (e.g., 10 nucleotides or more, 12 nucleotides or more, 15 nucleotides or more, 20 nucleotides or more, 22 nucleotides or more, 25 nucleotides or more, or 30 nucleotides or more). Any suitable in vitro assay may be utilized to assess whether two sequence “hybridize”. One such assay is a melting point analysis where the greater the degree of complementarity between two nucleotide sequences, the greater the value of the melting temperature (Tm) for hybrids of nucleic acids having those sequences. The conditions of temperature and ionic strength determine the “stringency” of the hybridization. Temperature, wash solution salt concentration, and other conditions may be adjusted as necessary according to factors such as length of the region of complementation and the degree of complementation. Hybridization and washing conditions are well known and exemplified in Sambrook, J., Fritsch, E. F. and Maniatis, T. Molecular Cloning: A Laboratory Manual, Second Edition, Cold Spring Harbor Laboratory Press, Cold Spring Harbor (1989), particularly Chapter 11 and Table 11.1 therein; and Sambrook, J. and Russell, W., Molecular Cloning: A Laboratory Manual, Third Edition, Cold Spring Harbor Laboratory Press, Cold Spring Harbor (2001). In some embodiments, a SR comprises a spacer sequence.

[0211] In some embodiments, a guide nucleic acid comprises at least 10, 11, 12, 13, 14, 15, 16, 17, 18, 19, 20, 21, 22, 23, 24, 25, 26, 27, 28, 29, or 30 contiguous nucleotides that are complementary to a target sequence of a target nucleic acid. In some embodiments, the target nucleic acid comprises a eukaryotic sequence. Such a eukaryotic sequence is a sequence of nucleotides that is present in a host eukaryotic cell. Such a sequence of nucleotides is distinguished from nucleotide sequences present in other host cells, such as prokaryotic cells, or viruses. Said sequences present in a eukaryotic cell may be located in a gene, an exon, an intron, a non-coding (e.g., promoter or enhancer) region, a selectable marker, tag, signal, and the like. In some embodiments, a target sequence is a eukaryotic sequence.

[0212] In some embodiments, guide nucleic acids comprise additional elements that contribute additional functionality (e.g., stability, heat resistance, etc.) to the guide nucleic acid. Such elements may be one or more nucleotide alterations, nucleotide sequences, intermolecular secondary structures, or intramolecular secondary structures (e.g., one or more hair pin regions, one or more bulges, etc.). In some embodiments, guide nucleic acids comprise one or more linkers. A linker may comprise 1, 2, 3, 4, 5, 6, 7, 8, 9, 10, or more nucleotides. A linker may be any suitable linker, examples of which are described herein.

[0213] In some embodiments, guide nucleic acids comprise one or more nucleotide sequences as described herein (e.g., TABLE 3). Such nucleotide sequences described herein (e.g., TABLE 3) may be described as a nucleotide sequence of either DNA or RNA, however, no matter the form the sequence is described, it is readily understood that such nucleotide sequences may be revised to be RNA or DNA, as needed, for describing a sequence within a guide nucleic acid itself or the sequence that encodes a guide nucleic acid, such as a nucleotide sequence described herein for a vector. Similarly, disclosure of the nucleotide sequences described herein (e.g., TABLE 3) also discloses the complementary nucleotide sequence, the reverse nucleotide sequence, and the reverse complement nucleotide sequence, any one of which may be a nucleotide sequence for use in a guide nucleic acid as described herein. In some embodiments, guide nucleic acid sequence(s) comprises one or more nucleotide alterations at one or more positions in any one of the sequences described herein. Alternative nucleotides may be any one or more of A, C, G, T or U, or a deletion, or an insertion.

[0214] TABLE 3 provides illustrative nucleotide sequences for use with the compositions, systems and methods of the disclosure. A guide nucleic acid may comprise one or more of: a nucleotide sequence described herein, a portion thereof, a variant thereof, or combinations thereof. In some embodiments, a guide nucleic acid comprises one or more nucleotide sequences, wherein each of the one or more nucleotide sequences is at least 65%, at least 70%, at least 80%, at least 90%, at least 92%, at least 95%, at least 97%, or at least 99%, or 100% identical to an equal length portion of any one of the sequences recited in TABLE 3. In some embodiments, a guide nucleic acid comprises one or more, two or more, three or more, four or more nucleotide sequences, wherein each nucleotide sequence is at least 65%, at least 70%, at least 80%, at least 90%, at least 92%, at least 95%, at least 97%, or at least 99%, or 100% identical to any one of the sequences recited in TABLE 3.

[0215] Repeat Sequence

[0216] Guide nucleic acids described herein may comprise one or more repeat sequences. In some embodiments, a repeat sequence comprises a nucleotide sequence that is not complementary to a target sequence of a target nucleic acid. In some embodiments, a repeat sequence comprises a nucleotide sequence that may interact with an effector protein. In some embodiments, a repeat sequence is connected to another sequence of a guide nucleic acid, such as an intermediary RNA sequence, that is capable of being non-covalently bound by an effector protein. In some embodiments, a repeat sequence may be capable of forming a guide nucleic acid-effector protein complex (e.g., a RNP complex).

[0217] In some embodiments, the repeat sequence is between 10 and 50, 12 and 48, 14 and 46, 16 and 44, and 18 and 42 nucleotides in length. In some embodiments, the repeat sequence is between 19 and 37 nucleotides in length.

[0218] In some embodiments, a repeat sequence is adjacent to a spacer sequence. In some embodiments, a repeat sequence is followed by a spacer sequence in the 5′ to 3′ direction. In some embodiments, a repeat sequence is adjacent to an intermediary RNA sequence. In some embodiments, a repeat sequence is 3′ to an intermediary RNA sequence. In some embodiments, an intermediary RNA sequence is followed by a repeat sequence, which is followed by a spacer sequence in the 5′ to 3′ direction. In some embodiments, a repeat sequence is linked to a spacer sequence and/or an intermediary RNA sequence. In some embodiments, a guide nucleic acid comprises a repeat sequence linked to a spacer sequence and/or to an intermediary RNA sequence, which may be a direct link or by any suitable linker, examples of which are described herein.

[0219] In some embodiments, guide nucleic acids comprise more than one repeat sequence (e.g., two or more, three or more, or four or more repeat sequences). In some embodiments, a guide nucleic acid comprises more than one repeat sequence separated by another sequence of the guide nucleic acid. For example, in some embodiments, a guide nucleic acid comprises two repeat sequences, wherein the first repeat sequence is followed by a spacer sequence, and the spacer sequence is followed by a second repeat sequence in the 5′ to 3′ direction. In some embodiments, the more than one repeat sequences are identical. In some embodiments, the more than one repeat sequences are not identical.

[0220] In some embodiments, the repeat sequence comprises two sequences that are complementary to each other and hybridize to form a double stranded RNA duplex (dsRNA duplex). In some instances, the two sequences are not directly linked and hybridize to form a stem loop structure. In some embodiments, the dsRNA duplex comprises 5, 10, 15, 20 or 25 base pairs (bp). In some embodiments, not all nucleotides of the dsRNA duplex are paired, and therefore the duplex forming sequence may include a bulge. In some embodiments, the repeat sequence comprises a hairpin or stem-loop structure, optionally at the 5′ portion of the repeat region. In some embodiments, a strand of the stem portion comprises a sequence and the other strand of the stem portion comprises a sequence that is, at least partially, complementary. In some embodiments, such sequences may have 65% to 100% complementarity (e.g., 65%, 70%, 75%, 80%, 85%, 90%, 95%, or 100% complementarity). In some embodiments, a guide nucleic acid comprises nucleotide sequence that when involved in hybridization events may hybridize over one or more segments such that intervening or adjacent segments are not involved in the hybridization event (e.g., a bulge, a loop structure or hairpin structure, etc.).

[0221] In some embodiments, a repeat sequence comprises a nucleotide sequence that is at least 65%, at least 70%, at least 75%, at least 80%, at least 85%, at least 90%, at least 95%, at least 97%, or at least 98%, at least 99%, or 100% identical to any one of an equal length portion of the repeat sequences in TABLE 3. In some embodiments, a repeat sequence comprises a nucleotide sequence, wherein the nucleotide sequence comprises one or more nucleotide alterations at one or more positions in any one of the sequences of TABLE 3. Alternative nucleotides may be any one or more of A, C, G, T or U, or a deletion, or an insertion.

[0222] Spacer Sequence

[0223] Guide nucleic acids described herein may comprise one or more spacer sequences. In some embodiments, a spacer sequence may bind or hybridize a guide nucleic acid, or a complex thereof, or portions thereof, to a target sequence of a target nucleic acid. For example, a spacer sequence may bind or hybridize at least a portion of an RNP complex to a target sequence of a target nucleic acid. In some embodiments, a spacer sequence comprises a nucleotide sequence that is, at least partially, hybridizable to an equal length of a sequence (e.g., a target sequence) of a target nucleic acid. Exemplary hybridization conditions are described herein.

[0224] In some embodiments, a spacer sequence comprises a nucleotide sequence that is, at least partially, complementary to an equal length of a sequence (e.g., a target sequence) of a target nucleic acid. In some embodiments, a spacer sequence comprises at least 5 to about 50 contiguous nucleotides that are complementary to a target sequence in a target nucleic acid. A spacer sequence may comprise complementary to a target sequence that is adjacent to a PAM which is recognizable by an effector protein described herein.

[0225] In some embodiments, a spacer sequence comprises at least 5 to about 50 linked nucleotides. In some embodiments, a spacer sequence comprises at least 5 to about 50, at least 5 to about 25, at least about 10 to at least about 25, or at least about 15 to about 25 linked nucleotides. In some embodiments, the spacer sequence comprises 15-28 linked nucleotides in length. In some embodiments, a spacer sequence comprises 15-26, 15-24, 15-22, 15-20, 15-18, 16-28, 16-26, 16-24, 16-22, 16-20, 16-18, 17-26, 17-24, 17-22, 17-20, 17-18, 18-26, 18-24, or 18-22 linked nucleotides in length. In some embodiments, the spacer sequence comprises 10, 11, 12, 13, 14, 15, 16, 17, 18, 19, 20, 21, 22, 23, 24, 25, 26, 27, 28, 29, 30, or more nucleotides.

[0226] In some embodiments, a spacer sequence is adjacent to a repeat sequence. In some embodiments, a spacer sequence follows a repeat sequence in a 5′ to 3′ direction. In some embodiments, the spacer sequence(s) and the repeat sequence(s) of the guide nucleic acid are present within the same molecule. In some embodiments, the spacer(s) and repeat sequence(s) are linked directly to one another. In some embodiments, a linker is present between the spacer(s) and repeat sequences. Linkers may be any suitable linker, such as exemplary linkers described herein. In some embodiments, the spacer sequence(s) and the repeat sequence(s) of the guide nucleic acid are present in separate molecules, which are joined to one another by base pairing interactions.

[0227] In some embodiments, a spacer sequence comprises a nucleotide sequence that is at least 65%, at least 70%, at least 75%, at least 80%, at least 85%, at least 90%, at least 95% or 100% complementary to a target sequence of a target nucleic acid. In some embodiments, a target nucleic acid, such as DNA or RNA, may be a cancer gene or gene associated with a genetic disorder, or an amplicon thereof, as described herein. In some embodiments, a target nucleic acid is a gene selected from TABLE 4. In some embodiments, a spacer sequence comprises a sequence that is at least 65%, at least 70%, at least 75%, at least 80%, at least 85%, at least 90%, at least 95% or 100% complementary to a target sequence of a target nucleic acid selected from TABLE 4.

[0228] It is understood that the spacer sequence of a spacer sequence need not be 100% complementary to that of a target sequence of a target nucleic acid to hybridize or hybridize specifically to the target sequence. For example, the spacer sequence may comprise at least one modification, such as substituted or modified nucleotide, that is not complementary to the corresponding nucleotide of the target sequence. Spacer sequences are further described throughout herein.

[0229] In some embodiments, a spacer sequence comprises a nucleotide sequence that is at least 65%, at least 70%, at least 75%, at least 80%, at least 85%, at least 90%, at least 95% or 100% identical to a sequence set forth in EXAMPLE 2 herein.

[0230] Linker

[0231] In some embodiments, a guide nucleic acid for use with compositions, systems, and methods described herein comprises one or more linkers, or a nucleic acid encoding one or more linkers. In some embodiments, the guide nucleic acid comprises at least one, at least two, at least three, at least four, at least five, at least six, at least seven, at least eight, at least nine, or at least ten linkers. In some embodiments, the guide nucleic acid comprises one, two, three, four, five, six, seven, eight, nine, or ten linkers. In some embodiments, the guide nucleic acid comprises more than one linkers. In some embodiments, at least two of the more than one linkers are same. In some embodiments, at least two of the more than one linkers are not same.

[0232] In some embodiments, a linker comprises one to ten, one to seven, one to five, one to three, two to ten, two to eight, two to six, two to four, three to ten, three to seven, three to five, four to ten, four to eight, four to six, five to ten, five to seven, six to ten, six to eight, seven to ten, or eight to ten linked nucleotides. In some embodiments, the linker comprises one, two, three, four, five, six, seven, eight, nine, or ten linked nucleotides. In some embodiments, a linker comprises a nucleotide sequence of 5′-GAAA-3′.

[0233] In some embodiments, a guide nucleic acid comprises one or more linkers connecting one or more of a repeat sequence, a spacer sequence, a handle sequence, and an intermediary RNA sequence. In some embodiments, the guide nucleic acid comprises one or more linkers connecting one or more of: a repeat sequence and a spacer sequence; a handle sequence and a spacer sequence; an intermediary RNA sequence and a repeat sequence; and an intermediary RNA sequence and a spacer sequence. In some embodiments, the guide nucleic acid comprises at least two repeat sequences connected by a linker.

[0234] Intermediary Sequence

[0235] Guide nucleic acids described herein may comprise one or more intermediary sequences. In general, an intermediary sequence is not transactivated or transactivating. An intermediary sequence may also be referred to as an intermediary RNA, although it may comprise deoxyribonucleotides instead of or in addition to ribonucleotides. In general, the intermediary sequence non-covalently binds to an effector protein. In some embodiments, the intermediary sequence forms a secondary structure, for example in a cell, and an effector protein binds the secondary structure.

[0236] In such embodiments, an intermediary RNA is useful as part of a single nucleic acid system for compositions, methods, and systems described herein. In such embodiments, a single nucleic acid system comprises a guide nucleic acid comprising an intermediary RNA and a crRNA wherein, the intermediary RNA is linked to the crRNA. In some embodiments, a guide nucleic acid comprises an intermediary RNA and a crRNA wherein a repeat sequence of a crRNA is linked to the intermediary RNA.

[0237] In some instances, the length of an intermediary RNA sequence is not greater than 50, 56, 68, 71, 73, 95, or 105 linked nucleotides. In some embodiments, the length of an intermediary RNA sequence is about 30 to about 120 linked nucleotides. In some embodiments, the length of an intermediary RNA sequence is about 50 to about 105, about 50 to about 95, about 50 to about 73, about 50 to about 71, about 50 to about 68, or about 50 to about 56 linked nucleotides. In some embodiments, the length of an intermediary RNA sequence is 56 to 105 linked nucleotides, from 56 to 105 linked nucleotides, 68 to 105 linked nucleotides, 71 to 105 linked nucleotides, 73 to 105 linked nucleotides, or 95 to 105 linked nucleotides. In some embodiments, the length of an intermediary RNA sequence is 40 to 60 nucleotides. In some embodiments, the length of the intermediary RNA sequence is 50, 56, 68, 71, 73, 95, or 105 linked nucleotides. In some embodiments, the length of the intermediary RNA sequence is 50 nucleotides.

[0238] An intermediary RNA sequence may also comprise or form a secondary structure (e.g., one or more hairpin loops) that facilitates the binding of an effector protein to a guide nucleic acid and/or modification activity of an effector protein on a target nucleic acid (e.g., a hairpin region). An intermediary RNA sequence may comprise from 5′ to 3′, a 5′ region, a hairpin region, and a 3′ region. In some embodiments, the 5′ region may hybridize to the 3′ region. In some embodiments, the 5′ region of the intermediary RNA sequence does not hybridize to the 3′ region.

[0239] In some embodiments, the hairpin region may comprise a first sequence, a second sequence that is reverse complementary to the first sequence, and a stem-loop linking the first sequence and the second sequence. In some embodiments, an intermediary RNA sequence comprises a stem-loop structure comprising a stem region and a loop region. In some embodiments, the stem region is 4 to 8 linked nucleotides in length. In some embodiments, the stem region is 5 to 6 linked nucleotides in length. In some embodiments, the stem region is 4 to 5 linked nucleotides in length. In some embodiments, an intermediary RNA sequence comprises a pseudoknot (e.g., a secondary structure comprising a stem at least partially hybridized to a second stem or half-stem secondary structure). An effector protein may interact with an intermediary RNA sequence comprising a single stem region or multiple stem regions. In some embodiments, the nucleotide sequences of the multiple stem regions are identical to one another. In some embodiments, the nucleotide sequences of at least one of the multiple stem regions is not identical to those of the others. In some embodiments, an intermediary RNA sequence comprises 1, 2, 3, 4, 5 or more stem regions.

[0240] In some embodiments, the 3′ region of the intermediary RNA sequence is linked to a repeat sequence. In some embodiments, the 3′ region of the intermediary RNA sequence is linked to a crRNA. In some embodiments, a crRNA or a repeat sequence is linked to intermediary RNA sequence directly (e.g, covalently linked, such as through a phosphodiester bond). In some embodiments, a crRNA or a repeat sequence is linked to intermediary RNA sequence by any suitable linker, examples of which are provided herein. In some embodiments, an intermediary RNA sequence may comprise an unhybridized sequence at the 3′ end. The unhybridized sequence may have a length of about 1, about 2, about 3, about 4, about 5, about 6, about 7, about 8, about 9, about 10, about 12, about 14, about 16, about 18, or about 20 linked nucleotides. In some embodiments, the length of the un-hybridized sequence is 0 to 20 linked nucleotides.

[0241] Handle Sequence

[0242] Guide nucleic acids described herein may comprise one or more handle sequences.

[0243] In some embodiments, handle sequence comprises one or more of an intermediary RNA sequence, a repeat sequence, a linker, or combinations thereof. A handle sequence may comprise all or a portion of an intermediary RNA sequence. In such instances, at least a portion of an intermediary RNA non-covalently interacts with an effector protein. Additionally, or alternatively, the nucleotide sequence of a handle sequence may contain all or a portion of a repeat sequence. In such instances, at least a portion of an intermediary RNA or both, at least a portion of the intermediary RNA and at least a portion of repeat sequence, non-covalently interacts with an effector protein. In general, a single guide nucleic acid, also referred to as a single guide RNA (sgRNA), comprises a handle sequence.

[0244] In some embodiments, a handle sequence comprises an intermediary RNA sequence that is 5′ to a repeat sequence. In some embodiments, handle sequence comprises an intermediary RNA sequence, wherein the intermediary RNA sequence interacts, at least partially, with an effector protein in a sequence-specific manner. In some embodiments, handle sequence comprises an intermediary RNA sequence and a repeat sequence, wherein the repeat sequence is 3′ to the intermediary RNA sequence. In some embodiments, handle sequence comprises a linked intermediary RNA sequence and repeat sequence. In some embodiments, an intermediary RNA sequence and repeat sequence are directly linked (e.g., covalently linked, such as through a phosphodiester bond). In some embodiments, the intermediary RNA sequence and repeat sequence are linked by a suitable linker, examples of which are provided herein.

[0245] In some embodiments, a handle sequence is not greater than about 50, 56, 66, 67, 68, 69, 70, 71, 72, 73, 95, or 105 linked nucleotides. In some embodiments, a handle sequence is about 30 to about 120 linked nucleotides. In some embodiments, a handle sequence is about 50 to about 105, about 50 to about 95, about 50 to about 73, about 50 to about 71, about 50 to about 70, or about 50 to about 69 linked nucleotides. In some embodiments, a handle sequence is about 56 to 105 linked nucleotides, about 56 to 105 linked nucleotides, about 66 to 105 linked nucleotides, about 67 to 105 linked nucleotides, about 68 to 105 linked nucleotides, about 69 to 105 linked nucleotides, about 70 to 105 linked nucleotides, about 71 to 105 linked nucleotides, about 72 to 105 linked nucleotides, about 73 to 105 linked nucleotides, or about 95 to 105 linked nucleotides.

[0246] crRNA

[0247] In some embodiments, a guide nucleic acid comprises a crRNA. In some embodiments, a crRNA directs and/or binds the guide nucleic acid, or a complex thereof, to a target sequence of a target nucleic acid. For example, a crRNA may direct and bind an RNP complex to a target nucleic acid. In some embodiments, a crRNA comprises a spacer sequence as described herein. In some embodiments, a crRNA comprises a repeat sequence. In some embodiments, a crRNA comprises a repeat sequence which interacts with an effector protein described herein. In some embodiments, a crRNA comprises a repeat sequence and a spacer sequence. In some embodiments, a crRNA comprises a linked repeat sequence and a spacer sequence, which may be directly linked or linked by a suitable linker.

[0248] In such embodiments, a crRNA is useful as a single nucleic acid system for compositions, methods, and systems described herein or as part of a single nucleic acid system for compositions, methods, and systems described herein. In some embodiments, a crRNA is useful as part of a single nucleic acid system for compositions, methods, and systems described herein. In such embodiments, a single nucleic acid system comprises a guide nucleic acid comprising a crRNA wherein, a repeat sequence of a crRNA is capable of connecting a crRNA to an effector protein by being linked to another nucleotide sequence of a guide nucleic acid that is capable of non-covalently bonding with an effector protein. In such embodiments, a repeat sequence of a crRNA is linked to an intermediary RNA. In some embodiments, a single nucleic acid system comprises a guide nucleic acid comprising a crRNA and an intermediary RNA.

[0249] In some embodiments, a crRNA may be used as part of a single nucleic acid system in compositions, methods, and systems described herein. In such embodiments, a single nucleic acid system comprises a guide nucleic acid comprising a crRNA wherein a repeat sequence of a crRNA is capable of connecting a crRNA to an effector protein by interacting, at least partially, to an effector protein.

[0250] In some embodiments, a crRNA is useful as a part of a dual nucleic acid system for compositions, methods, and systems described herein. In such embodiments, a dual nucleic acid system comprises a tracrRNA and guide nucleic acid comprising a crRNA described herein. In some embodiments, a tracrRNA comprises a sequence that is capable of non-covalently bonding with an effector protein and a repeat hybridization sequence. In some embodiments, a dual nucleic acid system comprises a tracrRNA and guide nucleic acid comprising a crRNA wherein a repeat sequence of a crRNA is capable of connecting a crRNA to an effector protein by hybridizing, at least partially, to a repeat hybridization sequence of a tracrRNA. Exemplary hybridization conditions are described herein.

[0251] In some embodiments, the length of the crRNA is not greater than about 40, about 45, about 50, about 55, about 60, about 65, about 70 or about 75 linked nucleotides. In some embodiments, the length of the crRNA is about 30 to about 120 linked nucleotides. In some embodiments, the length of a crRNA is about 40 to about 100, about 40 to about 90, about 40 to about 80, about 40 to about 70, about 40 to about 60, about 40 to about 50, about 50 to about 90, about 50 to about 80, about 50 to about 70, or about 50 to about 60 linked nucleotides. In some embodiments, the length of a crRNA is about 40, about 45, about 50, about 55, about 60, about 65, about 70 or about 75 linked nucleotides.

[0252] sgRNA

[0253] Guide nucleic acids described herein may be single guide nucleic acid, as referred to herein as a single guide RNA (sgRNA). In general, an sgRNA may be used as part of a single nucleic acid system in compositions, methods, and systems described herein. In some embodiments, a sgRNA comprises one or more of one or more of a handle sequence, an intermediary RNA sequence, a crRNA, a repeat sequence, a spacer sequence, a linker, or combinations thereof. For example, a sgRNA comprises a handle sequence and a spacer sequence; an intermediary RNA sequence and an crRNA; an intermediary RNA sequence, a repeat sequence and a spacer sequence; and the like.

[0254] In some embodiments, a sgRNA comprises an intermediary RNA sequence and an crRNA. In some embodiments, an intermediary RNA sequence is 5′ to a crRNA in an sgRNA. In some embodiments, a sgRNA comprises a linked intermediary RNA sequence and crRNA. In some embodiments, an intermediary RNA sequence and a crRNA are linked in an sgRNA directly (e.g, covalently linked, such as through a phosphodiester bond) In some embodiments, an intermediary RNA sequence and a crRNA are linked in an sgRNA by any suitable linker, examples of which are provided herein.

[0255] In some embodiments, a sgRNA comprises a handle sequence and a spacer sequence. In some embodiments, a handle sequence is 5′ to a spacer sequence in an sgRNA. In some embodiments, a sgRNA comprises a linked handle sequence and spacer sequence. In some embodiments, a handle sequence and a spacer sequence are linked in an sgRNA directly (e.g., covalently linked, such as through a phosphodiester bond) In some embodiments, a handle sequence and a spacer sequence are linked in an sgRNA by any suitable linker, examples of which are provided herein.

[0256] In some embodiments, a sgRNA comprises an intermediary RNA sequence, a repeat sequence, and a spacer sequence. In some embodiments, an intermediary RNA sequence is 5′ to a repeat sequence in an sgRNA. In some embodiments, a sgRNA comprises a linked intermediary RNA sequence and repeat sequence. In some embodiments, an intermediary RNA sequence and a repeat sequence are linked in an sgRNA directly (e.g., covalently linked, such as through a phosphodiester bond) In some embodiments, an intermediary RNA sequence and a repeat sequence are linked in an sgRNA by any suitable linker, examples of which are provided herein. In some embodiments, a repeat sequence is 5′ to a spacer sequence in an sgRNA. In some embodiments, a sgRNA comprises a linked repeat sequence and spacer sequence. In some embodiments, a repeat sequence and a spacer sequence are linked in an sgRNA directly (e.g, covalently linked, such as through a phosphodiester bond) In some embodiments, a repeat sequence and a spacer sequence are linked in an sgRNA by any suitable linker, examples of which are provided herein.

### VI. ENGINEERED MODIFICATIONS

[0257] Polypeptides (e.g., effector proteins or effector partners) and nucleic acids (e.g., engineered guide nucleic acids) described herein may be further modified as described throughout and as further described herein. Examples are modifications of interest that do not alter primary sequence, including chemical derivatization of polypeptides, e.g., acylation, acetylation, carboxylation, amidation, etc. Also included are modifications of glycosylation, e.g. those made by modifying the glycosylation patterns of a polypeptide during its synthesis and processing or in further processing steps; e.g. by exposing the polypeptide to enzymes which affect glycosylation, such as mammalian glycosylating or deglycosylating enzymes. Also embraced are sequences that have phosphorylated amino acid residues, e.g. phosphotyrosine, phosphoserine, or phosphothreonine.

[0258] Modifications disclosed herein may also include modification of described polypeptides and/or engineered guide nucleic acids through any suitable method, such as molecular biological techniques and/or synthetic chemistry, to improve their resistance to proteolytic degradation, to change the target sequence specificity, to optimize solubility properties, to alter protein activity (e.g., transcription modulatory activity, enzymatic activity, etc.) or to render them more suitable. Analogs of such polypeptides include those containing residues other than naturally occurring L-amino acids, e.g. D-amino acids or non-naturally occurring synthetic amino acids. D-amino acids may be substituted for some or all of the amino acid residues. Modifications may also include modifications with non-naturally occurring unnatural amino acids. The particular sequence and the manner of preparation will be determined by convenience, economics, purity required, and the like.

[0259] Modifications may further include the introduction of various groups to polypeptides and/or engineered guide nucleic acids described herein. For example, groups may be introduced during synthesis or during expression of a polypeptide (e.g., an effector protein and/or an effector partner), which allow for linking to other molecules or to a surface. Thus, e.g., cysteines may be used to make thioethers, histidines for linking to a metal ion complex, carboxyl groups for forming amides or esters, amino groups for forming amides, and the like.

[0260] Modifications may further include modification of nucleic acids described herein (e.g., engineered guide nucleic acids) to provide the nucleic acid with a new or enhanced feature, such as improved stability. Such modifications of a nucleic acid include a base modification, a backbone modification, a sugar modification, or combinations thereof, of one or more nucleotides, nucleosides, or nucleobases in a nucleic acid.

[0261] In some embodiments, nucleic acids (e.g., nucleic acids encoding effector proteins, nucleic acids encoding effector partners, engineered guide nucleic acids, or nucleic acids encoding engineered guide nucleic acids) described herein comprise one or more modifications comprising: 2′O-methyl modified nucleotides, 2′ Fluoro modified nucleotides; locked nucleic acid (LNA) modified nucleotides; peptide nucleic acid (PNA) modified nucleotides; nucleotides with phosphorothioate linkages; a 5′ cap (e.g., a 7-methylguanylate cap (m7G)), phosphorothioates, chiral phosphorothioates, phosphorodithioates, phosphotriesters, aminoalkylphosphotriesters, methyl and other alkyl phosphonates including 3′-alkylene phosphonates, 5′-alkylene phosphonates and chiral phosphonates, phosphinates, phosphoramidates including 3′-amino phosphoramidate and aminoalkyl phosphoramidates, phosphorodiamidates, thionophosphor amidates, thionoalkylphosphonates, thionoalkylphosphotriesters, selenophosphates and boranophosphates having normal 3′-5′ linkages, 2′-5′ linked analogs of these, and those having inverted polarity wherein one or more internucleotide linkages is a 3′ to 3′, 5′ to 5′ or 2′ to 2′ linkage; phosphorothioate and/or heteroatom internucleoside linkages, such as —CH2-NH—O—CH2-, —CH2-N(CH3)-O—CH2- (known as a methylene (methylimino) or MMI backbone), —CH2-O—N(CH3)-CH2-, —CH2-N(CH3)-N(CH3)-CH2- and —O—N(CH3)-CH2-CH2- (wherein the native phosphodiester internucleotide linkage is represented as —O—P(═O)(OH)—O—CH2-); morpholino linkages (formed in part from the sugar portion of a nucleoside); morpholino backbones; phosphorodiamidate or other non-phosphodiester internucleoside linkages; siloxane backbones; sulfide, sulfoxide and sulfone backbones; formacetyl and thioformacetyl backbones; methylene formacetyl and thioformacetyl backbones; riboacetyl backbones; alkene containing backbones; sulfamate backbones; methyleneimino and methylenehydrazino backbones; sulfonate and sulfonamide backbones; amide backbones; other backbone modifications having mixed N, O, S and CH₂ component parts; and combinations thereof.

### VII. VECTORS AND MULTIPLEXED EXPRESSION VECTORS

[0262] Compositions, systems, and methods described herein comprise a vector or a use thereof. A vector may encode one component of a composition or system described herein, or may encode multiple components (e.g., effector proteins, effector partners, guide nucleic acids, donor nucleic acids, target nucleic acids, etc., as described herein). The vector may be part of a vector system, wherein a vector system comprises a library of vectors each encoding one or more component of a composition or system described herein. In some embodiments, the vector system may be a multi-vector system, wherein a multi-vector system comprises a library of vectors wherein at least two vectors encode different components of a composition or system described herein. In some embodiments, components described herein (e.g., an effector protein, a guide nucleic acid, an effector partner, and/or a target nucleic acid) are encoded by the same vector. In some embodiments, components described herein (e.g., an effector protein, a guide nucleic acid, an effector partner, and/or a target nucleic acid) are each encoded by different vectors of the system.

[0263] In some embodiments, a vector may encode one or more of any system component, including but not limited to effector proteins, effector partners, guide nucleic acids, donor nucleic acids, and target nucleic acids as described herein. In some embodiments, a system component encoding sequence is operably linked to a promoter that is operable in a target cell, such as a eukaryotic cell. In some embodiments, a vector may encode 1, 2, 3, 4 or more of any system component. For example, a vector may encode two or more guide nucleic acids, wherein each guide nucleic acid comprises a different sequence. Also by way of non-limiting example, a single vector may encode an effector protein and an effector partner. A vector may encode an effector protein, an effector partner, and a guide nucleic acid. A vector may encode an effector protein, an effector partner, a guide nucleic acid, and a donor nucleic acid.

[0264] In some embodiments, a vector may comprise or encode one or more regulatory elements. Regulatory elements may refer to transcriptional and translational control sequences, such as promoters, enhancers, polyadenylation signals, terminators, protein degradation signals, and the like, that provide for and/or regulate transcription of a non-coding sequence or a coding sequence and/or regulate translation of an encoded polypeptide. In some embodiments, a vector may comprise or encode for one or more additional elements, such as, for example, replication origins, antibiotic resistance (or a nucleic acid encoding the same), a tag (or a nucleic acid encoding the same), selectable markers, and the like.

[0265] Vectors described herein may encode a promoter—a regulatory region on a nucleic acid, such as a DNA sequence, capable of initiating transcription of a downstream (3′ direction) coding or non-coding sequence. As used herein, a promoter may be bound at its 3′ terminus to a nucleic acid the expression or transcription of which is desired, and extends upstream (5′ direction) to include bases or elements necessary to initiate transcription or induce expression, which could be measured at a detectable level. A promoter may comprise a nucleotide sequence, referred to herein as a “promoter sequence”. A promoter sequence may include a transcription initiation site, and one or more protein binding domains responsible for the binding of transcription machinery, such as RNA polymerase. When eukaryotic promoters are used, such promoters may contain “TATA” boxes and “CAT” boxes. Various promoters, including inducible promoters, may be used to drive expression, i.e., transcriptional activation, of the nucleic acid of interest. Accordingly, in some embodiments, the nucleic acid of interest may be operably linked to a promoter.

[0266] Promotors may be any suitable type of promoter envisioned for the compositions, systems, and methods described herein. Examples include constitutively active promoters (e.g., CMV promoter), inducible promoters (e.g., heat shock promoter, tetracycline-regulated promoter, steroid-regulated promoter, metal-regulated promoter, estrogen receptor-regulated promoter, etc.), spatially restricted and/or temporally restricted promoters (e.g., a tissue specific promoter, a cell type specific promoter, etc.), etc. Suitable promoters include, but are not limited to: SV40 early promoter, mouse mammary tumor virus long terminal repeat (LTR) promoter; adenovirus major late promoter (Ad MLP); a herpes simplex virus (HSV) promoter, a cytomegalovirus (CMV) promoter such as the CMV immediate early promoter region (CMVIE), a rous sarcoma virus (RSV) promoter, a human U6 small nuclear promoter (U6), an enhanced U6 promoter, and a human Hl promoter (H1). By transcriptional activation, it is intended that transcription will be increased above basal levels in the target cell by 10 fold, by 100 fold, or by 1000 fold, or more. In addition, vectors used for providing a nucleic acid that, when transcribed, produces an engineered guide nucleic acid and/or a nucleic acid that encodes an effector protein to a cell may include nucleic acid sequences that encode for selectable markers in the target cells, so as to identify cells that have taken up the engineered guide nucleic acid and/or an effector protein.

[0267] In general, vectors provided herein comprise at least one promotor or a combination of promoters driving expression or transcription of one or more genome editing tools described herein. In some embodiments, the viral vector comprises a nucleotide sequence of a promoter. In some embodiments, the viral vector comprises two promoters. In some embodiments, the viral vector comprises three promoters. In some embodiments, the length of the promoter is less than about 500, less than about 400, or less than about 300 linked nucleotides. In some embodiments, the length of the promoter is at least 100 linked nucleotides. Non-limiting examples of promoters include CMV, 7SK, EF1a, RPBSA, hPGK, EFS, SV40, PGK1, Ubc, human beta actin promoter, CAG, TRE, UAS, Ac5, Polyhedrin, CaMKIIa, GAL1, H1, TEF1, GDS, ADH1, CaMV35S, Ubi, U6, MNDU3, MSCV, Ck8e, SPC5-12, Desmin, MND and CAG.

[0268] In some embodiments, the promoter is an inducible promoter that only drives expression of its corresponding gene when a signal is present, e.g., a hormone, a small molecule, a peptide. Non-limiting examples of inducible promoters are the T7 RNA polymerase promoter, the T3 RNA polymerase promoter, the Isopropyl-beta-D-thiogalactopyranoside (IPTG)-regulated promoter, a lactose induced promoter, a heat shock promoter, a tetracycline-regulated promoter (tetracycline-inducible or tetracycline-repressible), a steroid regulated promoter, a metal-regulated promoter, and an estrogen receptor-regulated promoter. In some embodiments, the promoter is an activation-inducible promoter, such as a CD69 promoter, as described further in Kulemzin et al., (2019), BMC Med Genomics, 12:44. In some embodiments, the promoter for expressing effector protein is a muscle-specific promoter. In some embodiments, the muscle-specific promoter comprises Ck8e, SPC5-12, or Desmin promoter sequence. In some embodiments, the promoter for expressing effector protein is a ubiquitous promoter. In some embodiments, the ubiquitous promoter comprises MND or CAG promoter sequence.

[0269] In some embodiments, a vector used herein is an nucleic acid expression vector. In some embodiments, a vector used herein is a recombinant expression vector. In some embodiments, a vector used herein is a messenger RNA.

[0270] In some embodiments, one or more components of a composition or system described herein (e.g., effector proteins, effector partners, guide nucleic acids, donor nucleic acids, target nucleic acids, etc., as described herein) are independently administered. In some embodiments, an effector protein (or a nucleic acid encoding same) and an effector partner (or a nucleic acid encoding same) are independently administered. In some embodiments, an effector protein (or a nucleic acid encoding same), an effector partner (or a nucleic acid encoding same), an engineered guide nucleic acid (or a nucleic acid that, when transcribed, produces same), and/or a donor nucleic acid are each independently administered. Independent administration may be contact with a target nucleic acid, administered to a cell, such as a host cell, or administered as method of nucleic acid detection, editing, and/or treatment as described herein, in a single vehicle, such as a single expression vector. In some embodiments, each components of a composition or system described herein are each independently administered in a single vehicle or expression vector.

[0271] In some embodiments, one or more components of a composition or system described herein are co-administered. In some embodiments, an effector protein (or a nucleic acid encoding same) and/or an engineered guide nucleic acid (or a nucleic acid that, when transcribed, produces same) are co-administered with a donor nucleic acid. Co-administration may be contact with a target nucleic acid, administered to a cell, such as a host cell, or administered as method of nucleic acid detection, editing, and/or treatment as described herein, in a single vehicle, such as a single expression vector. In some embodiments, an effector protein (or a nucleic acid encoding same) and/or an engineered guide nucleic acid (or a nucleic acid that, when transcribed, produces same) are not co-administered with donor nucleic acid in a single vehicle. In some embodiments, an effector protein (or a nucleic acid encoding same), an engineered guide nucleic acid (or a nucleic acid that, when transcribed, produces same), and/or donor nucleic acid are administered in one or more or two or more vehicles, such as one or more, or two or more expression vectors.

[0272] In some embodiments, a cell comprises a vector, a nucleic acid expression vector, or a library of nucleic acid expression vectors as described herein. In some embodiments, a cell comprises a target nucleic acid modified by any one of the compositions described herein, by any one of the nucleic acid expression vectors described herein, or by any one library of nucleic acid expression vectors as described herein. In some embodiments, the cell is a eukaryotic cell. In some embodiments, the cell is a mammalian cell. In some embodiments, the cell is a human cell. In some embodiments, a population of cells comprises at least one cell comprising a vector, a nucleic acid expression vector, or a library of nucleic acid expression vectors as described herein.

[0273] Viral Vectors

[0274] An expression vector may be a viral vector. In some embodiments, a viral vector comprises a nucleic acid to be delivered into a host cell via a recombinantly produced virus or viral particle. The nucleic acid may be single-stranded or double stranded, linear or circular, segmented or non-segmented. The nucleic acid may comprise DNA, RNA, or a combination thereof. In some embodiments, the expression vector is an adeno-associated viral vector. There are a variety of viral vectors that are associated with various types of viruses, including but not limited to retroviruses (e.g., lentiviruses and γ-retroviruses), adenoviruses, arenaviruses, alphaviruses, adeno-associated viruses (AAVs), baculoviruses, vaccinia viruses, herpes simplex viruses and poxviruses. A viral vector provided herein may be derived from or based on any such virus. Often the viral vectors provided herein are an adeno-associated viral vector (AAV vector). Generally, an AAV vector has two inverted terminal repeats (ITRs). According, in some embodiments, the viral vector provided herein comprises two inverted terminal repeats of AAV. The DNA sequence in between the ITRs of an AAV vector provided herein may be referred to herein as the sequence encoding the genome editing tools. These genome editing tools may include, but are not limited to, an effector protein, effector protein modifications (e.g., nuclear localization signal (NLS), polyA tail), guide nucleic acid(s), respective promoter(s), and a donor nucleic acid, or combinations thereof. In some embodiments, a nuclear localization signal comprises an entity (e.g., peptide) that facilitates localization of a nucleic acid, protein, or small molecule to the nucleus, when present in a cell that contains a nuclear compartment.

[0275] In general, viral vectors provided herein comprise at least one promotor or a combination of promoters driving expression or transcription of one or more genome editing tools described herein. In some embodiments, the length of the promoter is less than about 500, less than about 400, or less than about 300 linked nucleotides. In some embodiments, the length of the promoter is at least 100 linked nucleotides. Non-limiting examples of promoters include CMV, EF1a, RPBSA, hPGK, EFS, SV40, PGK1, Ubc, human beta actin promoter, CAG, TRE, UAS, Ac5, Polyhedrin, CaMKIIa, GAL1, H1, TEF1, GDS, ADH1, CaMV35S, Ubi, U6, MNDU3, and MSCV. In some embodiments, the promoter is an inducible promoter that only drives expression of its corresponding gene when a signal is present, e.g., a hormone, a small molecule, a peptide. Non-limiting examples of inducible promoters are the T7 RNA polymerase promoter, the T3 RNA polymerase promoter, the Isopropyl-beta-D-thiogalactopyranoside (IPTG)-regulated promoter, a lactose induced promoter, a heat shock promoter, a tetracycline-regulated promoter (tetracycline-inducible or tetracycline-repressible), a steroid regulated promoter, a metal-regulated promoter, and an estrogen receptor-regulated promoter. In some embodiments, the promoter is an activation-inducible promoter, such as a CD69 promoter, as described further in Kulemzin et al., (2019), BMC Med Genomics, 12:44.

[0276] In some embodiments, the coding region of the AAV vector forms an intramolecular double-stranded DNA template thereby generating an AAV vector that is a self-complementary AAV (scAAV) vector. In general, the sequence encoding the genome editing tools of an scAAV vector has a length of about 2 kb to about 3 kb. The scAAV vector may comprise nucleotide sequences encoding an effector protein, providing guide nucleic acids described herein, and a donor nucleic acid described herein. In some embodiments, the AAV vector provided herein is a self-inactivating AAV vector.

[0277] In some embodiments, an AAV vector provided herein comprises a modification, such as an insertion, deletion, chemical alteration, or synthetic modification, relative to a wild-type AAV vector.

[0278] In some embodiments, the viral particle that delivers the viral vector described herein is an AAV. AAVs are characterized by their serotype. Non-limiting examples of AAV serotypes are AAV1, AAV2, AAV3, AAV4, AAV5, AAV6, AAV7, AAV8, AAV9, AAV10, AAV11, AAV12, scAAV, AAV-rh10, chimeric or hybrid AAV, or any combination, derivative, or variant thereof.

[0279] Producing AAV Particles

[0280] The AAV particles described herein may be referred to as recombinant AAV (rAAV). Often, rAAV particles are generated by transfecting AAV producing cells with an AAV-containing plasmid carrying the sequence encoding the genome editing tools, a plasmid that carries viral encoding regions, i.e., Rep and Cap gene regions; and a plasmid that provides the helper genes such as EIA, EIB, E2A, E4ORF6 and VA. In some embodiments, the AAV producing cells are mammalian cells. In some embodiments, host cells for rAAV viral particle production are mammalian cells. In some embodiments, a mammalian cell for rAAV viral particle production is a COS cell, a HEK293T cell, a HeLa cell, a KB cell, a derivative thereof, or a combination thereof. In some embodiments, rAAV virus particles may be produced in the mammalian cell culture system by providing the rAAV plasmid to the mammalian cell. In some embodiments, producing rAAV virus particles in a mammalian cell may comprise transfecting vectors that express the rep protein, the capsid protein, and the gene-of-interest expression construct flanked by the ITR sequence on the 5′ and 3′ ends. Methods of such processes are provided in, for example, Naso et al., BioDrugs, 2017 August; 31(4):317-334 and Benskey et al., (2019), Methods Mol Biol., 1937:3-26, each of which is incorporated by reference in their entireties.

[0281] In some embodiments, rAAV is produced in a non-mammalian cell. In some embodiments, rAAV is produced in an insect cell. In some embodiments, an insect cell for producing rAAV viral particles comprises a Sf9 cell. In some embodiments, production of rAAV virus particles in insect cells may comprise baculovirus. In some embodiments, production of rAAV virus particles in insect cells may comprise infecting the insect cells with three recombinant baculoviruses, one carrying the cap gene, one carrying the rep gene, and one carrying the gene-of-interest expression construct enclosed by an ITR on both the 5′ and 3′ end. In some embodiments, rAAV virus particles are produced by the One Bac system. In some embodiments, rAAV virus particles may be produced by the Two Bac system. In some embodiments, in the Two Bac system, the rep gene and the cap gene of the AAV is integrated into one baculovirus virus genome, and the ITR sequence and the gene-of-interest expression construct is integrated into another baculovirus virus genome. In some embodiments, in the One Bac system, an insect cell line that expresses both the rep protein and the capsid protein is established and infected with a baculovirus virus integrated with the ITR sequence and the gene-of-interest expression construct. Details of such processes are provided in, for example, Smith et. al., (1983), Mol. Cell. Biol., 3(12):2156-65; Urabe et al., (2002), Hum. Gene. Ther., 1; 13(16):1935-43; and Benskey et al., (2019), Methods Mol Biol., 1937:3-26, each of which is incorporated by reference in its entirety.

[0282] Lipid Particles

[0283] In some embodiments, compositions and systems provided herein comprise a lipid particle. In some embodiments, a lipid particle is a lipid nanoparticle (LNP). In some embodiments, a lipid or a lipid nanoparticle may encapsulate an expression vector. In some embodiments, the expression vector incorporates the effector protein, the guide nucleic acid, the nucleic acid encoding the effector protein and/or the DNA molecule encoding the guide nucleic acid. LNPs are a non-viral delivery system for gene therapy. LNPs are effective for delivery of nucleic acids. Beneficial properties of LNP include ease of manufacture, low cytotoxicity and immunogenicity, high efficiency of nucleic acid encapsulation and cell transfection, multi-dosing capabilities and flexibility of design (Kulkarni et al., (2018) Nucleic Acid Therapeutics, 28(3):146-157). In some embodiments, a method may comprise contacting a cell with an expression vector. In some embodiments, contacting may comprise electroporation, lipofection, or lipid nanoparticle (LNP) delivery of an expression vector. In some embodiments, a nucleic acid expression vector is a non-viral vector. In some embodiments, compositions and methods comprise a lipid, polymer, nanoparticle, or a combination thereof, or use thereof, to introduce a Cas protein, guide nucleic acid, donor template or any combination thereof to a cell. Non-limiting examples of lipids and polymers are cationic polymers, cationic lipids, ionizable lipids, or bio-responsive polymers. In some embodiments, the ionizable lipids exploits chemical-physical properties of the endosomal environment (e.g., pH) offering improved delivery of nucleic acids. In some embodiments, the ionizable lipids are neutral at physiological pH. In some embodiments, the ionizable lipids are protonated under acidi pH. In some embodiments, the bio-responsive polymer exploits chemical-physical properties of the endosomal environment (e.g., pH) to preferentially release the genetic material in the intracellular space.

[0284] In some embodiments, a LNP comprises an outer shell and an inner core. In some embodiments, the outer shell comprises lipids. In some embodiments, the lipids comprise modified lipids. In some embodiments, the modified lipids comprise pegylated lipids. In some embodiments, the lipids comprise one or more of cationic lipids, anionic lipids, ionizable lipids, and non-ionic lipids. In some embodiments, the LNP comprises one or more of N¹,N³,N⁵-tris(3-(didodecylamino)propyl)benzene-1,3,5-tricarboxamide (TT3), 2-dioleoyl-sn-glycero-3-phosphoethanolamine (DOPE), 1-palmitoyl-2-oleoylsn-glycero-3-phosphoethanolamine (POPE), 1,2-distearoyl-sn-glycero-3-phosphocholine (DSPC), cholesterol (Choi), 1,2-dimyristoyl-sn-glycerol, and methoxypolyethylene glycol (DMG-PECh000), derivatives, analogs, or variants thereof. In some embodiments, the LNP has a negative net overall charge prior to complexation with one or more of a guide RNA, a nucleic acid encoding the guide RNA, an effector protein, and a nucleic acid encoding the effector protein. In some embodiments, the inner core is a hydrophobic core. In some embodiments, the guide RNA or the nucleic acid encoding the guide RNA forms a complex with one or more of the cationic lipids and the ionizable lipids. In some embodiments, the nucleic acid encoding the effector protein or the nucleic acid encoding the guide RNA is self-replicating.

[0285] In some embodiments, a LNP comprises one or more of a cationic lipid, an ionizable lipid and a modified version thereof. In some embodiments, the ionizable lipid comprises TT3 or a derivative thereof. Accordingly, in some embodiments, the LNP comprises one or more of TT3 and pegylated TT3. The publication WO2016187531 is hereby incorporated by reference in its entirety, which describes representative LNP formulations in Table 2, and Table 3, and representative methods of delivering LNP formulations in Example 7.

### VIII. TARGET NUCLEIC ACIDS AND SAMPLES

[0286] Described herein are compositions, systems and methods for modifying or detecting a target nucleic acid, wherein the target nucleic acid is a gene, a portion thereof, a transcript thereof. In some embodiments, the target nucleic acid is a reverse transcript (e.g. a cDNA) of an mRNA transcribed from the gene, or an amplicon thereof acid. In some embodiments, the target nucleic acid is a single stranded nucleic acid. Alternatively, or in combination, the target nucleic acid is a double stranded nucleic acid and is prepared into single stranded nucleic acids before or upon contacting the reagents. In some embodiments, the target nucleic acid is a double stranded nucleic acid. In some embodiments, the double stranded nucleic acid is DNA. The target nucleic acid may be a RNA. The target nucleic acids include but are not limited to mRNA, rRNA, tRNA, non-coding RNA, long non-coding RNA, and microRNA (miRNA). In some embodiments, the target nucleic acid is complementary DNA (cDNA) synthesized from a single-stranded RNA template in a reaction catalyzed by a reverse transcriptase. In some embodiments, the target nucleic acid is single-stranded RNA (ssRNA) or mRNA. In some embodiments, the target nucleic acid is from a virus, a parasite, or a bacterium described herein. As another non-limiting example, the target nucleic acid may be responsible for a disease, contain a mutation (e.g., single strand polymorphism, point mutation, insertion, or deletion), be contained in an amplicon, or be uniquely identifiable from the surrounding nucleic acids (e.g., contain a unique sequence of nucleotides).

[0287] In some embodiments, the target nucleic acid is a double stranded nucleic acid comprising a target strand and a non-target strand, wherein the target strand comprises a target sequence. In some embodiments, where a target strand comprises a target sequence, at least a portion of the engineered guide nucleic acid is complementary to the target sequence on the target strand. In some embodiments, where the target nucleic acid is a double stranded nucleic acid comprising a target strand and a non-target strand, and wherein the target strand comprises a target sequence, at least a portion of the engineered guide nucleic acid is complementary to the target sequence on the target strand. In some embodiments, a target nucleic acid comprises a PAM as described herein that is located on the non-target strand. Such a PAM described herein, in some embodiments, is adjacent (e.g., within 1, 2, 3, 4 or 5 nucleotides) to the 5′ end of the target sequence on the non-target strand of the double stranded DNA molecule. In some embodiments, such a PAM described herein is directly adjacent to the 5′ end of a target sequence on the non-target strand of the double stranded DNA molecule.

[0288] In some embodiments, an effector protein and/or effector partner described herein or a multimeric complex thereof recognizes a PAM on a target nucleic acid. In some embodiments, one or more effector proteins and/or one or more effector partners, or combinations thereof, of the multimeric complex recognize a PAM on a target nucleic acid. In some embodiments, only one effector protein of the multimeric complex recognizes a PAM on a target nucleic acid. In some embodiments, the PAM is 3′ to the spacer region of the crRNA. In some embodiments, the PAM is directly 3′ to the spacer region of the crRNA.

[0289] An effector protein of the present disclosure, a dimer thereof, or a multimeric complex thereof may cleave or nick a target nucleic acid within or near a protospacer adjacent motif (PAM) sequence of the target nucleic acid. In some embodiments, cleavage occurs within 1, 2, 3, 4, 5, 6, 7, 8, 9 or 10 nucleotides of a 5′ or 3′ terminus of a PAM sequence. A target nucleic acid may comprise a PAM sequence adjacent to a sequence that is complementary to a guide nucleic acid spacer region.

[0290] In some embodiments, the target nucleic acid comprises 5 to 100, 5 to 90, 5 to 80, 5 to 70, 5 to 60, 5 to 50, 5 to 40, 5 to 30, 5 to 25, 5 to 20, 5 to 15, or 5 to 10 linked nucleotides. In some embodiments, the target nucleic acid comprises 10 to 90, 20 to 80, 30 to 70, or 40 to 60 linked nucleotides. In some embodiments, the target nucleic acid comprises 5, 6, 7, 8, 9, 10, 11, 12, 13, 14, 15, 16, 17, 18, 19, 20, 21, 22, 23, 24, 25, 26, 27, 28, 29, 30, 31, 32, 33, 34, 35, 36, 37, 38, 39, 40, 45, 50, 60, 70, 80, 90, or 100 linked nucleotides. In some embodiments, the target nucleic acid comprises at least 10, at least 20, at least 30, at least 40, at least 50, at least 60, at least 70, at least 80, at least 90, or at least 100 linked nucleotides.

[0291] In some embodiments, the target nucleic acid comprises a portion or a specific region of a nucleic acid from a genomic locus, any DNA amplicon of, a reverse transcribed mRNA, or a cDNA from a gene described herein. In some embodiments, the target nucleic acid is an amplicon of at least a portion of a gene. Non-limiting examples of genes are set forth in TABLE 4. Nucleic acid sequences of target nucleic acids and/or corresponding genes are readily available in public databases as known and used in the art. In some embodiments, the target nucleic acid is selected from TABLE 4.

[0292] In some embodiments, the target nucleic acid comprises a target locus. In some embodiments, the target nucleic acid comprises more than one target loci. In some embodiments, the target nucleic acid comprises two target loci. Accordingly, in some embodiments, the target nucleic acid may comprise one or more target sequences.

[0293] In some embodiments, the one or more target sequence is within any one of the genes set forth in TABLE 4. In some embodiments, the target sequence is within an exon of any one of the genes set forth in TABLE 4. In some embodiments, then target sequence covers the junction of two exons. In some embodiments, the target sequence is located within about 1 to about 300 nucleotides, about 10 to about 250, about 20 to about 200, about 30 to about 150, about 40 to about 100, or about 50 nucleotides of the 5′ untranslated region (UTR). In some embodiments, the target sequence is located within about 1 to about 300 nucleotides, about 10 to about 250, about 20 to about 200, about 30 to about 150, about 40 to about 100, or about 50 nucleotides of the 3′ UTR.

[0294] In some embodiments, the target sequence is at least partially within a targeted exon within any one of the genes set forth in TABLE 4. A targeted exon may mean any portion within, contiguous with, or adjacent to a specified exon of interest may be targeted by the compositions, systems, and methods described herein. In some embodiments, one or more of the exons are targeted. In some embodiments, one or more of exons of any one the genes set forth in TABLE 4 are targeted.

[0295] In some embodiments, the start of an exon is referred to interchangeably herein as the 5′ end of an exon. In some embodiments, the 5′ region of an exon comprises a sequence about 1 to about 300 nucleotides adjacent to the 5′ end of an exon when moving upstream in the 5′ direction, or a sequence about 1 to about 300 nucleotides adjacent to the 5′ end of an exon when moving downstream in the 3′ direction, or both.

[0296] In some embodiments, the end of an exon is referred to interchangeably herein as the 3′ end of an exon. In some embodiments, the 3′ region of an exon comprises a sequence about 1 to about 300 nucleotides adjacent to the 3′ end of an exon when moving upstream in the 5′ direction, or a sequence about 1 to about 300 nucleotides adjacent to the 3′ end of an exon when moving downstream in the 3′ direction, or both.

[0297] Nucleic acids, such as DNA and pre-mRNA, may contain at least one intron and at least one exon, wherein as read in the 5′ to the 3′ direction of a nucleic acid strand, the 3′ end of an intron may be adjacent to the 5′ end of an exon, and wherein said intron and exon correspond for transcription purposes. If a nucleic acid strand contains more than one intron and exon, the 5′ end of the second intron is adjacent to the 3′ end of the first exon, and 5′ end of the second exon is adjacent to the 3′ end of the second intron. The junction between an intron and an exon may be referred to herein as a splice junction, wherein a 5′ splice site (SS) may refer to the +1/+2 position at the 5′ end of intron and a 3′ SS may refer to the last two positions at the 3′ end of an intron. Alternatively, a 5′ SS may refer to the 5′ end of an exon and a 3′ SS may refer to the 3′ end of an exon. In some embodiments, nucleic acids may contain one or more elements that act as a signal during transcription, splicing, and/or translation. In some embodiments, signaling elements include a 5′ SS, a 3′SS, a premature stop codon, U1 and/or U2 binding sequences, and cis acting elements such as branch site (BS), polypyridine tract (PYT), exonic and intronic splicing enhancers (ESEs and ISEs) or silencers (ESSs and ISSs).

[0298] In some embodiments, a target sequence that a guide nucleic acid binds is at least partially within a targeted exon within any one of the genes set forth in TABLE 4, and wherein at least a portion of the target nucleic acid is within a sequence about 1 to about 300 nucleotides adjacent to: the start of a targeted exon, the end of a targeted exon, or both. In some embodiments, at least a portion of the target sequence that a guide nucleic acid binds may comprise a sequence about 1 to about 300 nucleotides, about 10 to about 250, about 20 to about 200, about 30 to about 150, about 40 to about 100, or about 50 nucleotides adjacent to: the start of a targeted exon, the end of a targeted exon, or both.

[0299] In some embodiments, at least a portion of the target nucleic acid that a guide nucleic acid binds is within a sequence about 5 or more, about 10 or more, about 15 or more, about 20 or more, about 25 or more, about 30 or more, about 35 or more, about 40 or more, about 45 or more, about 50 or more, about 55 or more, about 60 or more, about 65 or more, about 70 or more, about 75 or more, about 80 or more, about 85 or more, about 90 or more, about 95 or more, about 100 or more, about 105 or more, about 110 or more, about 115 or more, about 120 or more, about 125 or more, about 130 or more, about 135 or more, about 140 or more, about 145 or more, or about 150 or more nucleotides adjacent to: the start of a targeted exon, the end of a targeted exon, or both.

[0300] In some embodiments, a target sequence that a guide nucleic acid binds is at least partially within a targeted exon within any one of the genes set forth in TABLE 4, and wherein at least a portion of the target nucleic acid is within a sequence about 1 to about 300 nucleotides adjacent to: the start of a targeted exon, the end of a targeted exon, or both. In some embodiments, at least a portion of the target sequence that a guide nucleic acid binds may comprise a sequence about 1 to about 300 nucleotides, about 10 to about 250, about 20 to about 200, about 30 to about 150, about 40 to about 100, or about 50 nucleotides adjacent to: one or more signaling element comprising a 5'S S, a 3′ SS, a premature stop codon, U1 binding sequence, U2 binding sequence, a BS, a PYT, ESE, an ISE, an ESS, an ISS, more than one of the foregoing, or any combination thereof.

[0301] In some embodiments, at least a portion of the target nucleic acid that a guide nucleic acid binds is within a sequence about 5 or more, about 10 or more, about 15 or more, about 20 or more, about 25 or more, about 30 or more, about 35 or more, about 40 or more, about 45 or more, about 50 or more, about 55 or more, about 60 or more, about 65 or more, about 70 or more, about 75 or more, about 80 or more, about 85 or more, about 90 or more, about 95 or more, about 100 or more, about 105 or more, about 110 or more, about 115 or more, about 120 or more, about 125 or more, about 130 or more, about 135 or more, about 140 or more, about 145 or more, or about 150 or more nucleotides adjacent to: one or more signaling element comprising a 5′ SS, a 3′ SS, a premature stop codon, U1 binding sequence, U2 binding sequence, a BS, a PYT, ESE, an ISE, an ESS, an ISS, more than one of the foregoing, or any combination thereof.

[0302] Further description of editing or detecting a target nucleic acid in the foregoing genes may be found in more detail in Kim et al., “Enhancement of target specificity of CRISPR-Cas12a by using a chimeric DNA-RNA guide”, Nucleic Acids Res. 2020 Sep. 4; 48(15):8601-8616; Wang et al., “Specificity profiling of CRISPR system reveals greatly enhanced off-target gene editing”, Scientific Reports volume 10, Article number: 2269 (2020); Tuladhar et al., “CRISPR-Cas9-based mutagenesis frequently provokes on-target mRNA misregulation”, Nature Communications volume 10, Article number: 4056 (2019); Dong et al., “Genome-Wide Off-Target Analysis in CRISPR-Cas9 Modified Mice and Their Offspring”, G3, Volume 9, Issue 11, 1 Nov. 2019, Pages 3645-3651; Winter et al., “Genome-wide CRISPR screen reveals novel host factors required for Staphylococcus aureus α-hemolysin-mediated toxicity”, Scientific Reports volume 6, Article number: 24242 (2016); and Ma et al., “A CRISPR-Based Screen Identifies Genes Essential for West-Nile-Virus-Induced Cell Death”, Cell Rep. 2015 Jul. 28; 12(4):673-83, which are hereby incorporated by reference in their entirety.

[0303] In some embodiments, the target nucleic acid is in a cell described herein. In some embodiments, a cell described herein comprises a composition described herein, or a nucleic acid expression vector or library described herein. In some embodiments, a cell described herein comprises a target nucleic acid modified by a composition described herein, or a nucleic acid expression vector or library described herein. In some embodiments, a cell is a eukaryotic cell. In some embodiments, a cell is a mammalian cell. In some embodiments, a cell is a human cell. In some embodiments, the human cell is a: muscle cell, cardiac cell, visceral cell, cardiac muscle cell, smooth muscle cell, cardiomyocyte, nodal cardiac muscle cell, smooth muscle cell, visceral muscle cell, skeletal muscle cell, myocyte, red (or slow) skeletal muscle cell, white (fast) skeletal muscle cell, intermediate skeletal muscle, muscle satellite cell, muscle stem cell, myoblast, muscle progenitor cell, induced pluripotent stem cell (iPS), or a cell derived from an iPS cell, modified to have its gene edited and differentiated into myoblasts, muscle progenitor cells, muscle satellite cells, muscle stem cells, skeletal muscle cells, cardiac muscle cells or smooth muscle cells. In some embodiments, a population of cells comprises at least one cell, wherein the at least one cell is a cell described herein.

[0304] An RNP complex may comprise high selectivity for a target sequence. In some embodiments, an RNP complex may comprise a selectivity of at least 200:1, 100:1, 50:1, 20:1, 10:1, or 5:1 fora target nucleic acid over a single nucleotide variant of the target nucleic acid. In some embodiments, a ribonucleoprotein may comprise a selectivity of at least 5:1 for a target nucleic acid over a single nucleotide variant of the target nucleic acid. Leveraging effector protein selectivity, some methods described herein may detect a target nucleic acid present in the sample in various concentrations or amounts as a target nucleic acid population. In some embodiments, the sample has at least 2 target nucleic acids. In some embodiments, the sample has at least 3, 5, 10, 20, 30, 40, 50, 100, 200, 300, 400, 500, 600, 700, 800, 900, 1000, 2000, 3000, 4000, 5000, 6000, 7000, 8000, 9000, or 10000 target nucleic acids. In some embodiments, the sample comprises 1 to 10,000, 100 to 8000, 400 to 6000, 500 to 5000, 1000 to 4000, or 2000 to 3000 target nucleic acids. In some embodiments, the method detects target nucleic acid present at least at one copy per 10 non-target nucleic acids, 10² non-target nucleic acids, 10³ non-target nucleic acids, 10⁴ non-target nucleic acids, 10⁵ non-target nucleic acids, 10⁶ non-target nucleic acids, 10⁷ non-target nucleic acids, 10⁸ non-target nucleic acids, 10⁹ non-target nucleic acids, or 10¹⁰ non-target nucleic acids.

[0305] Often, the target nucleic acid may be from 0.05% to 20% of total nucleic acids in the sample. Sometimes, the target nucleic acid is 0.1% to 10% of the total nucleic acids in the sample. The target nucleic acid, in some embodiments, is 0.1% to 5% of the total nucleic acids in the sample. The target nucleic acid may also be 0.1% to 1% of the total nucleic acids in the sample. The target nucleic acid may be DNA or RNA. The target nucleic acid may be any amount less than 100% of the total nucleic acids in the sample. The target nucleic acid may be 100% of the total nucleic acids in the sample.

[0306] The target nucleic acid may be 0.05% to 20% of total nucleic acids in the sample. Sometimes, the target nucleic acid is 0.1% to 10% of the total nucleic acids in the sample. The target nucleic acid, in some embodiments, is 0.1% to 5% of the total nucleic acids in the sample. Often, a sample comprises the segment of the target nucleic acid and at least one nucleic acid comprising less than 100% sequence identity to the segment of the target nucleic acid but no less than 50% sequence identity to the segment of the target nucleic acid. For example, the segment of the target nucleic acid comprises a mutation as compared to at least one nucleic acid comprising less than 100% sequence identity to the segment of the target nucleic acid but no less than 50% sequence identity to the segment of the target nucleic acid. Often, the segment of the target nucleic acid comprises a single nucleotide mutation as compared to at least one nucleic acid comprising less than 100% sequence identity to the segment of the target nucleic acid but no less than 50% sequence identity to the segment of the target nucleic acid.

[0307] A target nucleic acid may be an amplified nucleic acid of interest. The nucleic acid of interest may be any nucleic acid disclosed herein or from any sample as disclosed herein. The nucleic acid of interest may be an RNA that is reverse transcribed before amplification. The nucleic acid of interest may be amplified then the amplicons may be transcribed into RNA.

[0308] In some embodiments, compositions described herein exhibit indiscriminate trans-cleavage of ssRNA, enabling their use for detection of RNA in samples. In some embodiments, target ssRNA are generated from many nucleic acid templates (RNA) in order to achieve cleavage of the FQ reporter in the DETECTR platform. Certain effector proteins may be activated by ssRNA, upon which they may exhibit trans-cleavage of ssRNA and may, thereby, be used to cleave ssRNA FQ reporter molecules in the DETECTR system. These effector proteins may target ssRNA present in the sample or ssRNA generated and/or amplified from any number of nucleic acid templates (RNA). Described herein are reagents comprising a single stranded reporter nucleic acid comprising a detection moiety, wherein the reporter nucleic acid (e.g., the ssDNA-FQ reporter described above) is capable of being cleaved by the Effector protein, upon generation and amplification of ssRNA from a nucleic acid template using the methods disclosed herein, thereby generating a first detectable signal.

[0309] In some embodiments, target nucleic acids comprise at least one nucleic acid comprising at least 50% sequence identity to the target nucleic acid or a portion thereof. Sometimes, the at least one nucleic acid comprises an amino acid sequence that is at least 60%, 70%, 75%, 80%, 85%, 90%, 91%, 92%, 93%, 94%, 95%, 96%, 97%, 98%, or 99% identical to an equal length portion of the target nucleic acid. Sometimes, the at least one nucleic acid comprises an amino acid sequence that is 100% identical to an equal length portion of the target nucleic acid. Sometimes, the amino acid sequence of the at least one nucleic acid is at least 60%, 70%, 75%, 80%, 85%, 90%, 91%, 92%, 93%, 94%, 95%, 96%, 97%, 98%, or 99% identical to the target nucleic acid. Sometimes, the target nucleic acid comprises an amino acid sequence that is less than 60%, 70%, 75%, 80%, 85%, 90%, 91%, 92%, 93%, 94%, 95%, 96%, 97%, 98%, or 99% identical to an equal length portion of the at least one nucleic acid.

[0310] In some embodiments, samples comprise a target nucleic acid at a concentration of less than 1 nM, less than 2 nM, less than 3 nM, less than 4 nM, less than 5 nM, less than 6 nM, less than 7 nM, less than 8 nM, less than 9 nM, less than 10 nM, less than 20 nM, less than 30 nM, less than 40 nM, less than 50 nM, less than 60 nM, less than 70 nM, less than 80 nM, less than 90 nM, less than 100 nM, less than 200 nM, less than 300 nM, less than 400 nM, less than 500 nM, less than 600 nM, less than 700 nM, less than 800 nM, less than 900 nM, less than 1 μM, less than 2 μM, less than 3 μM, less than 4 μM, less than 5 μM, less than 6 μM, less than 7 μM, less than 8 μM, less than 9 μM, less than 10 μM, less than 100 μM, or less than 1 mM. In some embodiments, the sample comprises a target nucleic acid at a concentration of 1 nM to 2 nM, 2 nM to 3 nM, 3 nM to 4 nM, 4 nM to 5 nM, 5 nM to 6 nM, 6 nM to 7 nM, 7 nM to 8 nM, 8 nM to 9 nM, 9 nM to 10 nM, 10 nM to 20 nM, 20 nM to 30 nM, 30 nM to 40 nM, 40 nM to 50 nM, 50 nM to 60 nM, 60 nM to 70 nM, 70 nM to 80 nM, 80 nM to 90 nM, 90 nM to 100 nM, 100 nM to 200 nM, 200 nM to 300 nM, 300 nM to 400 nM, 400 nM to 500 nM, 500 nM to 600 nM, 600 nM to 700 nM, 700 nM to 800 nM, 800 nM to 900 nM, 900 nM to 1 μM, 1 μM to 2 μM, 2 μM to 3 μM, 3 μM to 4 μM, 4 μM to 5 μM, 5 μM to 6 μM, 6 μM to 7 μM, 7 μM to 8 μM, 8 μM to 9 μM, 9 μM to 10 μM, 10 μM to 100 μM, 100 μM to 1 mM, 1 nM to 10 nM, 1 nM to 100 nM, 1 nM to 1 μM, 1 nM to 10 μM, 1 nM to 100 μM, 1 nM to 1 mM, 10 nM to 100 nM, 10 nM to 1 μM, 10 nM to 10 μM, 10 nM to 100 μM, 10 nM to 1 mM, 100 nM to 1 μM, 100 nM to 10 μM, 100 nM to 100 μM, 100 nM to 1 mM, 1 μM to 10 μM, 1 μM to 100 μM, 1 μM to 1 mM, 10 μM to 100 μM, 10 μM to 1 mM, or 100 μM to 1 mM. In some embodiments, the sample comprises a target nucleic acid at a concentration of 20 nM to 200 μM, 50 nM to 100 μM, 200 nM to 50 μM, 500 nM to 20 μM, or 2 μM to 10 μM. In some embodiments, the target nucleic acid is not present in the sample.

[0311] In some embodiments, samples comprise fewer than 10 copies, fewer than 100 copies, fewer than 1000 copies, fewer than 10,000 copies, fewer than 100,000 copies, or fewer than 1,000,000 copies of a target nucleic acid. In some embodiments, the sample comprises 10 copies to 100 copies, 100 copies to 1000 copies, 1000 copies to 10,000 copies, 10,000 copies to 100,000 copies, 100,000 copies to 1,000,000 copies, 10 copies to 1000 copies, 10 copies to 10,000 copies, 10 copies to 100,000 copies, 10 copies to 1,000,000 copies, 100 copies to 10,000 copies, 100 copies to 100,000 copies, 100 copies to 1,000,000 copies, 1,000 copies to 100,000 copies, or 1,000 copies to 1,000,000 copies of a target nucleic acid. In some embodiments, the sample comprises 10 copies to 500,000 copies, 200 copies to 200,000 copies, 500 copies to 100,000 copies, 1000 copies to 50,000 copies, 2000 copies to 20,000 copies, 3000 copies to 10,000 copies, or 4000 copies to 8000 copies. In some embodiments, the target nucleic acid is not present in the sample.

[0312] A number of target nucleic acid populations are consistent with the methods and compositions disclosed herein. Some methods described herein may detect two or more target nucleic acid populations present in the sample in various concentrations or amounts. In some embodiments, the sample has at least 2 target nucleic acid populations. In some embodiments, the sample has at least 3, 4, 5, 6, 7, 8, 9, 10, 20, 30, 40, or 50 target nucleic acid populations. In some embodiments, the sample has 3 to 50, 5 to 40, or 10 to 25 target nucleic acid populations. In some embodiments, the method detects target nucleic acid populations that are present at least at one copy per 10¹ non-target nucleic acids, 10² non-target nucleic acids, 10³ non-target nucleic acids, 10⁴ non-target nucleic acids, 10⁵ non-target nucleic acids, 10⁶ non-target nucleic acids, 10⁷ non-target nucleic acids, 10⁸ non-target nucleic acids, 10⁹ non-target nucleic acids, or 10¹⁰ non-target nucleic acids. The target nucleic acid populations may be present at different concentrations or amounts in the sample.

[0313] In some embodiments, target nucleic acids may activate an effector protein to initiate sequence-independent cleavage of a nucleic acid-based reporter (e.g., a reporter comprising an RNA sequence, or a reporter comprising DNA and RNA). For example, an effector protein of the present disclosure is activated by a target nucleic acid to cleave reporters having an RNA (also referred to herein as an “RNA reporter”). Alternatively, an effector protein of the present disclosure is activated by a target nucleic acid to cleave reporters having an RNA. Alternatively, an effector protein of the present disclosure is activated by a target RNA to cleave reporters having an RNA (also referred to herein as a “RNA reporter”). The RNA reporter may comprise a single-stranded RNA labelled with a detection moiety or may be any RNA reporter as disclosed herein.

[0314] In some embodiments, the target nucleic acid as described in the methods herein does not initially comprise a PAM sequence. However, any target nucleic acid of interest may be generated using the methods described herein to comprise a PAM sequence, and thus be a PAM target nucleic acid. A PAM target nucleic acid, as used herein, refers to a target nucleic acid that has been amplified to insert a PAM sequence that is recognized by an effector protein system.

[0315] In some embodiments, the target nucleic acid is in a cell. In some embodiments, the cell is a single-cell eukaryotic organism; a plant cell an algal cell; a fungal cell; an animal cell; a cell an invertebrate animal; a cell a vertebrate animal such as fish, amphibian, reptile, bird, and mammal; or a cell a mammal such as a human, a non-human primate, an ungulate, a feline, a bovine, an ovine, and a caprine. In preferred embodiments, the cell is a eukaryotic cell. In preferred embodiments, the cell is a mammalian cell, a human cell, or a plant cell.

[0316] In some embodiments, the target nucleic acid comprises a nucleic acid sequence from a pathogen responsible for a disease. Non-limiting examples of pathogens are bacteria, a virus and a fungus. The target nucleic acid, in some embodiments, is a portion of a nucleic acid from a sexually transmitted infection or a contagious disease. In some embodiments, the target nucleic acid is a portion of a nucleic acid from a genomic locus, or any DNA amplicon, such as a reverse transcribed mRNA or a cDNA from a gene locus, a transcribed mRNA, or a reverse transcribed cDNA from a gene locus in at least one of: human immunodeficiency virus (HIV), human papillomavirus (HPV), chlamydia, gonorrhea, syphilis, trichomoniasis, sexually transmitted infection, malaria, Dengue fever, Ebola, chikungunya, and leishmaniasis. Pathogens include viruses, fungi, helminths, protozoa, malarial parasites, Plasmodium parasites, Toxoplasma parasites, and Schistosoma parasites. Helminths include roundworms, heartworms, and phytophagous nematodes, flukes, Acanthocephala, and tapeworms. Protozoan infections include infections from Giardia spp., Trichomonas spp., African trypanosomiasis, amoebic dysentery, babesiosis, balantidial dysentery, Chaga's disease, coccidiosis, malaria and toxoplasmosis. Examples of pathogens such as parasitic/protozoan pathogens include, but are not limited to: Plasmodium falciparum, P. vivax, Trypanosoma cruzi and Toxoplasma gondii. Fungal pathogens include, but are not limited to Cryptococcus neoformans, Histoplasma capsulatum, Coccidioides immitis, Blastomyces dermatitides, Chlamydia trachomatis, and Candida albicans. Pathogenic viruses include but are not limited to coronavirus (e.g., SARS-CoV-2); immunodeficiency virus (e.g., HIV); influenza virus; dengue; West Nile virus; herpes virus; yellow fever virus; Hepatitis Virus C; Hepatitis Virus A; Hepatitis Virus B; papillomavirus; and the like. Pathogens include, e.g., HIV virus, Mycobacterium tuberculosis, Streptococcus agalactiae, methicillin-resistant Staphylococcus aureus, Legionella pneumophila, Streptococcus pyogenes, Escherichia coli, Neisseria gonorrhoeae, Neisseria meningitidis, Pneumococcus, Cryptococcus neoformans, Histoplasma capsulatum, Hemophilus influenzae B, Treponema pallidum, Lyme disease spirochetes, Pseudomonas aeruginosa, Mycobacterium leprae, Brucella abortus, rabies virus, influenza virus, cytomegalovirus, herpes simplex virus I, herpes simplex virus II, human serum parvo-like virus, respiratory syncytial virus (RSV), M. genitalium, T. vaginalis, varicella-zoster virus, hepatitis B virus, hepatitis C virus, measles virus, adenovirus, human T-cell leukemia viruses, Epstein-Barr virus, murine leukemia virus, mumps virus, vesicular stomatitis virus, Sindbis virus, lymphocytic choriomeningitis virus, wart virus, blue tongue virus, Sendai virus, feline leukemia virus, Reovirus, polio virus, simian virus 40, mouse mammary tumor virus, dengue virus, rubella virus, West Nile virus, Plasmodium falciparum, Plasmodium vivax, Toxoplasma gondii, Trypanosoma rangeli, Trypanosoma cruzi, Trypanosoma rhodesiense, Trypanosoma brucei, Schistosoma mansoni, Schistosoma japonicum, Babesia bovis, Eimeria tenella, Onchocerca volvulus, Leishmania tropica, Mycobacterium tuberculosis, Trichinella spiralis, Theileria parva, Taenia hydatigena, Taenia ovis, Taenia saginata, Echinococcus granulosus, Mesocestoides corti, Mycoplasma arthritidis, M. hyorhinis, M. orale, M. arginini, Acholeplasma laidlawii, M. salivarium and M. pneumoniae. In some embodiments, the target sequence is a portion of a nucleic acid from a genomic locus, a transcribed mRNA, or a reverse transcribed cDNA from a gene locus of bacterium or other agents responsible for a disease in the sample comprising a mutation that confers resistance to a treatment, such as a single nucleotide mutation that confers resistance to antibiotic treatment.

[0317] In some embodiments, the target nucleic acid comprises a nucleic acid sequence of a virus, a bacterium, or other pathogen responsible for a disease in a plant (e.g., a crop). Methods and compositions of the disclosure may be used to treat or detect a disease in a plant. For example, the methods of the disclosure may be used to target a viral nucleic acid sequence in a plant. An effector protein of the disclosure may cleave the viral nucleic acid. In some embodiments, the target nucleic acid comprises a nucleic acid sequence of a virus or a bacterium or other agents (e.g., any pathogen) responsible for a disease in the plant (e.g., a crop). In some embodiments, the target nucleic acid comprises RNA. The target nucleic acid, in some embodiments, is a portion of a nucleic acid from a virus or a bacterium or other agents responsible for a disease in the plant (e.g., a crop). In some embodiments, the target nucleic acid is a portion of a nucleic acid from a genomic locus, or any NA amplicon, such as a reverse transcribed mRNA or a cDNA from a gene locus, a transcribed mRNA, or a reverse transcribed cDNA from a gene locus in at a virus or a bacterium or other agents (e.g., any pathogen) responsible for a disease in the plant (e.g., a crop). A virus infecting the plant may be an RNA virus. A virus infecting the plant may be a DNA virus. Non-limiting examples of viruses that may be targeted with the disclosure include Tobacco mosaic virus (TMV), Tomato spotted wilt virus (TSWV), Cucumber mosaic virus (CMV), Potato virus Y (PVY), Cauliflower mosaic virus (CaMV) (RT virus), Plum pox virus (PPV), Brome mosaic virus (BMV) and Potato virus X (PVX).

[0318] In some embodiments, compositions, systems, and methods described herein comprise a modified target nucleic acid. In some embodiments, compositions, systems, and methods described herein comprise a modified target nucleic acid which may describe a target nucleic acid wherein the target nucleic acid has undergone a modification, for example, after contact with an effector protein. In some embodiments, the modified target nucleic acid comprises a modification. In some embodiments, the modification is an alteration in the sequence of the target nucleic acid. In some embodiments, the modified target nucleic acid comprises an insertion, deletion, or replacement of one or more nucleotides compared to the unmodified target nucleic acid. In some embodiments, the modification is a mutation. In some embodiments, the modification of the target nucleic acid comprises insertion of a donor nucleic acid, deletion of a target nucleic acid, insertion of a donor nucleic acid fragment, deletion of a target nucleic acid fragment, or combinations thereof. In some embodiments, the modification of the target nucleic acid comprises insertion of a donor nucleic acid or donor nucleic acid fragment into the target nucleic acid. In some embodiments, the modification of the target nucleic acid comprises deletion of a target nucleic acid or a target nucleic acid fragment from the target nucleic acid.

[0319] Mutations

[0320] In some embodiments, target nucleic acids comprise a mutation. In some embodiments, a composition, system or method described herein may be used to modify a target nucleic acid comprising a mutation such that the mutation is modified to be a wild-type nucleotide or nucleotide sequence. In some embodiments, a composition, system or method described herein may be used to detect a target nucleic acid comprising a mutation. In some embodiments, a sequence comprising a mutation may be modified to a wildtype sequence with a composition, system or method described herein. In some embodiments, a sequence comprising a mutation may be detected with a composition, system or method described herein. The mutation may be a mutation of 1, 2, 3, 4, 5, 6, 7, 8, 9, 10, 11, 12, 13, 14, 15, 16, 17, 18, 19, 20 or more nucleotides. The mutation may comprise a deletion of about 5, about 10, about 15, about 20, about 25, about 30, about 35, about 40, about 45, about 50, about 55, about 60, about 65, about 70, about 75, about 80, about 85, about 90, about 95, about 100, about 200, about 300, about 400, about 500, about 600, about 700, about 800, about 900, or about 1000 nucleotides. The mutation may comprise a deletion of 1 to 5, 5 to 10, 10 to 15, 15 to 20, 20 to 25, 25 to 30, 30 to 35, 35 to 40, 40 to 45, 45 to 50, 50 to 55, 55 to 60, 60 to 65, 65 to 70, 70 to 75, 75 to 80, 80 to 85, 85 to 90, 90 to 95, 95 to 100, 100 to 200, 200 to 300, 300 to 400, 400 to 500, 500 to 600, 600 to 700, 700 to 800, 800 to 900, 900 to 1000, 1 to 50, 1 to 100, 25 to 50, 25 to 100, 50 to 100, 100 to 500, 100 to 1000, or 500 to 1000 nucleotides. Non-limiting examples of mutations are insertion-deletion (indel), single nucleotide polymorphism (SNP), and frameshift mutations. In some embodiments, guide nucleic acids described herein hybridize to a region of the target nucleic acid comprising the mutation. The mutation may be located in a non-coding region or a coding region of a gene.

[0321] A mutation may be in an open reading frame of a target nucleic acid. A mutation may result in the insertion of at least one amino acid in a protein encoded by the target nucleic acid. A mutation may result in the deletion of at least one amino acid in a protein encoded by the target nucleic acid. A mutation may result in the substitution of at least one amino acid in a protein encoded by the target nucleic acid. A mutation that results in the deletion, insertion, or substitution of one or more amino acids of a protein encoded by the target nucleic acid may result in misfolding of a protein encoded by the target nucleic acid. A mutation may result in a premature stop codon, thereby resulting in a truncation of the encoded protein.

[0322] In some embodiments, a mutation comprises a point mutation or single nucleotide polymorphism (SNP), a chromosomal mutation, a copy number mutation, or any combination thereof. A point mutation optionally comprises a substitution, insertion, or deletion. In some embodiments, a mutation comprises a chromosomal mutation. A chromosomal mutations may comprise an inversion, a deletion, a duplication, or a translocation of one or more nucleotides. In some embodiments, a mutation comprises a copy number variation. A copy number variation may comprise a gene amplification or an expanding trinucleotide repeat. In some embodiments, guide nucleic acids described herein hybridize to a target sequence of a target nucleic acid comprising the mutation. In some embodiments, mutations are located in a non-coding region of a gene.

[0323] In some embodiments, target nucleic acids comprise a mutation, wherein the mutation is a SNP. The single nucleotide mutation or SNP may be associated with a phenotype of the sample or a phenotype of the organism from which the sample was taken. The SNP, in some embodiments, is associated with altered phenotype from wild type phenotype. In some embodiments, a single nucleotide mutation, SNP, or deletion described herein is associated with a disease, such as a genetic disease. The SNP may be a synonymous substitution or a nonsynonymous substitution. The nonsynonymous substitution may be a missense substitution or a nonsense point mutation. The synonymous substitution may be a silent substitution. The mutation may be a deletion of one or more nucleotides. Often, the single nucleotide mutation, SNP, or deletion is associated with a disease such as cancer or a genetic disorder. The mutation, such as a single nucleotide mutation, a SNP, or a deletion, may be encoded in the sequence of a target nucleic acid from the germline of an organism or may be encoded in a target nucleic acid from a diseased cell, such as a cancer cell.

[0324] In some embodiments, the target nucleic acid comprises a mutation associated with a disease. In some examples, a mutation associated with a disease refers to a mutation whose presence in a subject indicates that the subject is susceptible to or suffers from, a disease, disorder, condition, or syndrome. In some examples, a mutation associated with a disease refers to a mutation which causes, contributes to the development of, or indicates the existence of the disease, disorder, condition, or syndrome. A mutation associated with a disease may also refer to any mutation which generates transcription or translation products at an abnormal level, or in an abnormal form, in cells affected by a disease relative to a control without the disease. In some examples, a mutation associated with a disease refers to a mutation whose presence in a subject indicates that the subject is susceptible to, or suffers from, a disease, disorder, or pathological state. In some embodiments, a mutation associated with a disease, comprises the co-occurrence of a mutation and the phenotype of a disease. The mutation may occur in a gene, wherein transcription or translation products from the gene occur at a significantly abnormal level or in an abnormal form in a cell or subject harboring the mutation as compared to a non-disease control subject not having the mutation.

[0325] In some embodiments, target nucleic acids comprise a mutation, wherein the mutation is a deletion of 1, 2, 3, 4, 5, 6, 7, 8, 9, 10, 11, 12, 13, 14, 15, 16, 17, 18, 19, 20 or more nucleotides. In some embodiments, a target nucleic acid comprises a mutation of 1, 2, 3, 4, 5, 6, 7, 8, 9, 10, 11, 12, 13, 14, 15, 16, 17, 18, 19, 20 or more nucleotides. The mutation may be a deletion of about 5, about 10, about 15, about 20, about 25, about 30, about 35, about 40, about 45, about 50, about 55, about 60, about 65, about 70, about 75, about 80, about 85, about 90, about 95, about 100, about 200, about 300, about 400, about 500, about 600, about 700, about 800, about 900, or about 1000 nucleotides. The mutation may be a deletion of 1 to 5, 5 to 10, 10 to 15, 15 to 20, 20 to 25, 25 to 30, 30 to 35, 35 to 40, 40 to 45, 45 to 50, 50 to 55, 55 to 60, 60 to 65, 65 to 70, 70 to 75, 75 to 80, 80 to 85, 85 to 90, 90 to 95, 95 to 100, 100 to 200, 200 to 300, 300 to 400, 400 to 500, 500 to 600, 600 to 700, 700 to 800, 800 to 900, 900 to 1000, 1 to 50, 1 to 100, 25 to 50, 25 to 100, 50 to 100, 100 to 500, 100 to 1000, or 500 to 1000 nucleotides.

[0326] Certain Samples

[0327] Various sample types comprising a target nucleic acid of interest are consistent with the present disclosure. These samples may comprise a target nucleic acid for detection. In some embodiments, the detection of the target nucleic indicates an ailment, such as a disease, cancer, or genetic disorder, or genetic information, such as for phenotyping, genotyping, or determining ancestry and are compatible with the reagents and support mediums as described herein. Generally, a sample from an individual or an animal or an environmental sample may be obtained to test for presence of a disease, cancer, genetic disorder, or any mutation of interest.

[0328] In some embodiments, the sample is a biological sample, an environmental sample, or a combination thereof. Non-limiting examples of biological samples are blood, serum, plasma, saliva, urine, mucosal sample, peritoneal sample, cerebrospinal fluid, gastric secretions, nasal secretions, sputum, pharyngeal exudates, urethral or vaginal secretions, an exudate, an effusion, and a tissue sample (e.g., a biopsy sample). A tissue sample from a subject may be dissociated or liquified prior to application to detection system of the present disclosure. Non-limiting examples of environmental samples are soil, air, or water. In some embodiments, an environmental sample is taken as a swab from a surface of interest or taken directly from the surface of interest.

[0329] In some embodiments, the sample is a raw (unprocessed, unmodified) sample. Raw samples may be applied to a system for detecting or modifying a target nucleic acid, such as those described herein. In some embodiments, the sample is diluted with a buffer or a fluid or concentrated prior to its application to the system or be applied neat to the detection system. Sometimes, the sample contains no more 20 μl of buffer or fluid. The sample, in some embodiments, is contained in no more than 1, 5, 10, 15, 20, 25, 30, 35 40, 45, 50, 55, 60, 65, 70, 75, 80, 90, 100, 200, 300, 400, 500 μl, or any of value 1 μl to 500 μl, preferably 10 μL to 200 μL, or more preferably 50 μL to 100 μL of buffer or fluid. Sometimes, the sample is contained in more than 500 μl.

[0330] In some embodiments, the sample is taken from a single-cell eukaryotic organism; a plant or a plant cell; an algal cell; a fungal cell; an animal cell, tissue, or organ; a cell, tissue, or organ from an invertebrate animal; a cell, tissue, fluid, or organ from a vertebrate animal such as fish, amphibian, reptile, bird, and mammal; a cell, tissue, fluid, or organ from a mammal such as a human, a non-human primate, an ungulate, a feline, a bovine, an ovine, and a caprine. In some embodiments, the sample is taken from nematodes, protozoans, helminths, or malarial parasites. In some embodiments, the sample comprises nucleic acids from a cell lysate from a eukaryotic cell, a mammalian cell, a human cell, a prokaryotic cell, or a plant cell. In some embodiments, the sample comprises nucleic acids expressed from a cell.

[0331] In some embodiments, samples are used for diagnosing a disease. In some embodiments the disease is cancer. The sample used for cancer testing may comprise at least one target nucleic acid that may bind to a guide nucleic acid of the reagents described herein. The target nucleic acid, in some embodiments, comprises a portion of a gene comprising a mutation associated with a disease, such as cancer, a gene whose overexpression is associated with cancer, a tumor suppressor gene, an oncogene, a checkpoint inhibitor gene, a gene associated with cellular growth, a gene associated with cellular metabolism, or a gene associated with cell cycle. Sometimes, the target nucleic acid encodes a cancer biomarker, such as a prostate cancer biomarker or non-small cell lung cancer. In some embodiments, the assay may be used to detect “hotspots” in target nucleic acids that may be predictive of lung cancer. In some embodiments, the target nucleic acid comprises a portion of a nucleic acid that is associated with a blood fever. In some embodiments, the target nucleic acid is a portion of a nucleic acid from a genomic locus, any DNA amplicon of, a reverse transcribed mRNA, or a cDNA from a locus of at least one of: ALK, APC, ATM, AXIN2, BAP1, BARD1, BLM, BMPR1A, BRCA1, BRCA2, BRIP1, CASR, CDC73, CDH1, CDK4, CDKN1B, CDKN1C, CDKN2A, CEBPA, CHEK2, CTNNA1, DICER1, DIS3L2, EGFR, EPCAM, FH, FLCN, GATA2, GPC3, GREM1, HOXB13, HRAS, MAX, MEN1, MET, MITF, MLH1, MSH2, MSH3, MSH6, MUTYH, NBN, NF1, NF2, NTHL1, PALB2, PDGFRA, PHOX2B, PMS2, POLD1, POLE, POT1, PRKAR1A, PTCH1, PTEN, RAD50, RAD51C, RAD51D, RB1, RECQL4, RET, RUNX1, SDHA, SDHAF2, SDHB, SDHC, SDHD, SMAD4, SMARCA4, SMARCB1, SMARCE1, STK11, SUFU, TERC, TERT, TMEM127, TP53, TSC1, TSC2, VHL, WRN, and WT1. Any region of the aforementioned gene loci may be probed for a mutation or deletion using the compositions and methods disclosed herein. For example, in the EGFR gene locus, the compositions and methods for detection disclosed herein may be used to detect a single nucleotide polymorphism or a deletion.

[0332] In some embodiments, samples are used to diagnose a genetic disorder, also referred to as genetic disorder testing. The sample used for genetic disorder testing may comprise at least one target nucleic acid that may bind to a guide nucleic acid of the reagents described herein. In some embodiments, the genetic disorder is hemophilia, sickle cell anemia, 0-thalassemia, Duchene muscular dystrophy, severe combined immunodeficiency, Huntington's disease, or cystic fibrosis. The target nucleic acid, in some embodiments, is from a gene with a mutation associated with a genetic disorder, from a gene whose overexpression is associated with a genetic disorder, from a gene associated with abnormal cellular growth resulting in a genetic disorder, or from a gene associated with abnormal cellular metabolism resulting in a genetic disorder. In some embodiments, the target nucleic acid is a nucleic acid from a genomic locus, a transcribed mRNA, or a reverse transcribed mRNA, a DNA amplicon of or a cDNA from a locus of at least one of: CFTR, FMR1, SMN1, ABCB11, ABCC8, ABCD1, ACAD9, ACADM, ACADVL, ACAT1, ACOX1, ACSF3, ADA, ADAMTS2, ADGRG1, AGA, AGL, AGPS, AGXT, AIRE, ALDH3A2, ALDOB, ALG6, ALMS1, ALPL, ANGPTL3, AMT, Apo(a), ApoC111, APOEE4, APP, AQP2, ARG1, ARSA, ARSB, ASL, ASNS, ASPA, ASS1, ATM, ATP6V1B1, ATP7A, ATP7B, ATRX, ATXN2, BACE-1, BBS1, BBS10, BBS12, BBS2, BCKDHA, BCKDHB, BCS1L, BLM, BSND, C9ORF72, CAH1, CAPN3, CBS, CDH23, CEP290, CERKL, CHCHD10, CHM, CHRNE, CIITA, CLN3, CLN5, CLN6, CLN8, CLRN1, CMT1A, CNGB3, COL27A1, COL4A3, COL4A4, COL4A5, COL7A1, CPS1, CPT1A, CPT2, CRB1, CTNS, CTSK, CYBA, CYBB, CYP11B1, CYP11B2, CYP17A1, CYP19A1, CYP27A1, DBT, DCLRE1C, DHCR7, DHDDS, DLD, DMD, DNAH5, DNAI1, DNAI2, DYSF, EDA, EIF2B5, EMD, ERCC6, ERCC8, ESCO2, ETFA, ETFDH, ETHE1, EVC, EVC2, EYS, F9, FAH, FAM161A, FANCA, FANCC, FANCG, FH, FKRP, FKTN, FSHD1, FUS, FVIII, FXI, G6PC, GAA, GALC, GALK1, GALT, GAMT, GBA, GBE1, GCDH, GFM1, GJB1, GJB2, GLA, GLB1, GLDC, GLE1, GNE, GNPTAB, GNPTG, GNS, GRHPR, HADHA, HAX1, HBA1, HBA2, HBB, HEXA, HEXB, HGSNAT, HLCS, HMGCL, HOGA1, HPS1, HPS3, HSD17B4, HSD3B2, HTT, HYAL1, HYLS1, IDS, IDUA, IKBKAP, IL2RG, IVD, KCNJ11, LAMA2, LAMA3, LAMB3, LAMC2, LCA5, LDLR, LDLRAP1, LHX3, LIFR, LIPA, LOXHD1, LPL, LRPPRC, MAN2B1, MAPT, MCOLN1, MED17, MESP2, MFSD8, MKS1, MLC1, MMAA, MMAB, MMACHC, MMADHC, MPI, MPL, MPV17, MTHFR, MTM1, MTRR, MTTP, MUT, MYO7A, NAGLU, NAGS, NBN, NDRG1, NDUFAF5, NDUFS6, NEB, NPC1, NPC2, NPHS1, NPHS2, NR2E3, NTRK1, OAT, OPA3, OTC, PAH, PC, PCCA, PCCB, PCDH15, PCSK9, PDHA1, PDHB, PEX1, PEX10, PEX12, PEX2, PEX6, PEX7, PFKM, PHGDH, PKHD1, PMP22, PMM2, POMGNT1, PPT1, PROP1, PRPS1, PSEN1, PSEN2, PSAP, PSD95, PTS, PUS1, PYGM, RAB23, RAG2, RAPSN, RARS2, RDH12, RMRP, RPE65, RPGRIP1L, RS1, RTEL1, SACS, SAMHD1, SEPSECS, SGCA, SGCB, SGCG, SGSH, SLC12A3, SLC12A6, SLC17A5, SLC22A5, SLC25A13, SLC25A15, SLC26A2, SLC26A4, SLC35A3, SLC37A4, SLC39A4, SLC4A11, SLC6A8, SLC7A7, SMARCAL1, SMPD1, SOD1, SERPINC1, SERPING1, STAR, SUMF1, TARDBP, TAT, TCIRG1, TECPR2, TFR2, TGM1, TH, TMEM216, TPP1, TRMU, TSFM, TTR, TTPA, TYMP, USH1C, USH2A, VPS13A, VPS13B, VPS45, VRK1, VSX2, WNT10A, XPA, XPC, and ZFYVE26.

[0333] The sample used for phenotyping testing may comprise at least one target nucleic acid that may bind to a guide nucleic acid of the reagents described herein. The target nucleic acid, in some embodiments, is a nucleic acid encoding a sequence associated with a phenotypic trait.

[0334] The sample used for genotyping testing may comprise at least one target nucleic acid that may bind to a guide nucleic acid of the reagents described herein. The target nucleic acid, in some embodiments, is a nucleic acid encoding a sequence associated with a genotype of interest.

[0335] The sample used for ancestral testing may comprise at least one target nucleic acid that may bind to a guide nucleic acid of the reagents described herein. The target nucleic acid, in some embodiments, is a nucleic acid encoding a sequence associated with a geographic region of origin or ethnic group.

[0336] The sample may be used for identifying a disease status. For example, a sample is any sample described herein, and is obtained from a subject for use in identifying a disease status of a subject. The disease may be a cancer or genetic disorder. Sometimes, a method comprises obtaining a serum sample from a subject; and identifying a disease status of the subject. Often, the disease status is prostate disease status, but the status of any disease may be assessed.

[0337] Any of the above disclosed samples are consistent with the methods, compositions, reagents, enzymes, and systems disclosed herein.

### IX. SYSTEMS

[0338] Disclosed herein are systems for detecting and/or modifying target nucleic acid. In some embodiments, systems comprise components comprising one or more: effector protein described herein; guide nucleic acid described herein; target nucleic acid described herein; donor nucleic acid described herein; a solution or buffer; a reagent; a support medium; other components or appurtenances as described herein; or combinations thereof. In some embodiments, a system comprising one or more components (e.g., effector proteins, effector partners, guide nucleic acids, donor nucleic acids, target nucleic acids, etc., as described herein), wherein one or more compositions comprise the one or more components. In some embodiments, a composition comprises one system component as described herein. In some embodiments, a composition comprising a system component is individually administered. In some embodiments, one or more components are individually administered. In some embodiments, each of the one or more components individually administered can interact with other components following independent administration. In some embodiments, each component of a composition or system described herein are each independently administered in a single composition. In some embodiments, independent administration comprises contact with a target nucleic acid, a target cell or host cell, or administration as a method of nucleic acid detection, editing, and/or treatment as described herein.

[0339] In some embodiments, one or more components are administered in multiple compositions, wherein the one or more components can interact with each other following administration. In some embodiments, the interaction between the one or more components occurs within a target cell or a host cell.

[0340] In some embodiments, one or more components of a composition or system described herein are co-administered. In some embodiments, an effector protein (or a nucleic acid encoding same) and/or an engineered guide nucleic acid (or a nucleic acid that, when transcribed, produces same) are co-administered with a donor nucleic acid. Co-administration may be contact with a target nucleic acid, administered to a cell, such as a host cell, or administered as method of nucleic acid detection, editing, and/or treatment as described herein, in a single composition. In some embodiments, an effector protein (or a nucleic acid encoding same) and/or an engineered guide nucleic acid (or a nucleic acid that, when transcribed, produces same) are not co-administered with donor nucleic acid in a single composition. In some embodiments, an effector protein (or a nucleic acid encoding same), an engineered guide nucleic acid (or a nucleic acid that, when transcribed, produces same), and/or donor nucleic acid are administered in one or more compositions.

[0341] Systems may be used to modify the activity or expression of a target nucleic acid. In some embodiments, systems comprise an effector protein described herein, a reagent, support medium, or a combination thereof.

[0342] In some embodiments, systems comprise an effector protein described herein, a guide nucleic acid described herein, a reagent, support medium, or a combination thereof. In some embodiments, the effector protein comprises an effector protein, or a fusion protein thereof, described herein. In some embodiments, effector protein comprises an amino acid sequence that is at least 65%, at least 70%, at least 75%, at least 80%, at least 85%, at least 90%, at least 95%, or 100% identical to any one of the sequences of TABLE 1.

[0343] Systems may be used for detecting the presence or the absence of a target nucleic acid as described herein. Systems may be used for detecting the presence or the absence of a target nucleic acid associated with or causative of a disease or disorder, such as a genetic disorder. Systems may be used for detecting the presence or the absence of a target nucleic acid associated with or causative of a disease or disorder as described herein. In some embodiments, systems are useful for phenotyping, genotyping, or determining ancestry. Unless specified otherwise, systems include kits and may be referred to as kits. Unless specified otherwise, systems include devices and may also be referred to as devices. Systems described herein may be provided in the form of a companion diagnostic assay or device, a point-of-care assay or device, or an over-the-counter diagnostic assay/device.

[0344] Reagents and effector proteins and/or effector partners of various systems may be provided in a reagent chamber or on a support medium. Alternatively, the reagent and/or effector protein and/or effector partners may be contacted with the reagent chamber or the support medium by the individual using the system. An exemplary reagent chamber is a test well or container. The opening of the reagent chamber may be large enough to accommodate the support medium. Optionally, the system comprises a buffer and a dropper. The buffer may be provided in a dropper bottle for ease of dispensing. The dropper may be disposable and transfer a fixed volume. The dropper may be used to place a sample into the reagent chamber or on the support medium.

[0345] System Solutions

[0346] In general, system components comprise a solution in which the activity of an effector protein occurs. Often, the solution comprises or consists essentially of a buffer. The solution or buffer may comprise a buffering agent, a salt, a crowding agent, a detergent, a reducing agent, a competitor, or a combination thereof. Often the buffer is the primary component or the basis for the solution in which the activity occurs. Thus, concentrations for components of buffers described herein (e.g., buffering agents, salts, crowding agents, detergents, reducing agents, and competitors) are the same or essentially the same as the concentration of these components in the solution in which the activity occurs. In some embodiments, a buffer is required for cell lysis activity or viral lysis activity.

[0347] In some embodiments, systems comprise a buffer, wherein the buffer comprise at least one buffering agent. Exemplary buffering agents include HEPES, TRIS, MES, ADA, PIPES, ACES, MOPSO, BIS-TRIS propane, BES, MOPS, TES, DISO, Trizma, TRICINE, GLY-GLY, HEPPS, BICINE, TAPS, A MPD, A MPSO, CHES, CAPSO, AMP, CAPS, phosphate, citrate, acetate, imidazole, or any combination thereof. In some embodiments, the concentration of the buffering agent in the buffer is 1 mM to 200 mM. A buffer compatible with an effector protein may comprise a buffering agent at a concentration of 10 mM to 30 mM. A buffer compatible with an effector protein may comprise a buffering agent at a concentration of about 20 mM. A buffering agent may provide a pH for the buffer or the solution in which the activity of the effector protein occurs. The pH may be 3 to 4, 3.5 to 4.5, 4 to 5, 4.5 to 5.5, 5 to 6, 5.5 to 6.5, 6 to 7, 6.5 to 7.5, 7 to 8, 7.5 to 8.5, 8 to 9, 8.5 to 9.5, 9 to 10, or 9.5 to 10.5.

[0348] In some embodiments, systems comprise a solution, wherein the solution comprises at least one salt. In some embodiments, the at least one salt is selected from potassium acetate, magnesium acetate, sodium chloride, potassium chloride, magnesium chloride, calcium chloride, and any combination thereof. In some embodiments, the concentration of the at least one salt in the solution is 5 mM to 100 mM, 5 mM to 10 mM, 1 mM to 60 mM, or 1 mM to 10 mM. In some embodiments, the concentration of the at least one salt is about 105 mM. In some embodiments, the concentration of the at least one salt is about 55 mM. In some embodiments, the concentration of the at least one salt is about 7 mM. In some embodiments, the solution comprises potassium acetate and magnesium acetate. In some embodiments, the solution comprises sodium chloride and magnesium chloride. In some embodiments, the solution comprises potassium chloride and magnesium chloride. In some embodiments, the salt is a magnesium salt and the concentration of magnesium in the solution is at least 5 mM, 7 mM, at least 9 mM, at least 11 mM, at least 13 mM, or at least 15 mM. In some embodiments, the concentration of magnesium is less than 20 mM, less than 18 mM, or less than 16 mM.

[0349] In some embodiments, systems comprise a solution, wherein the solution comprises at least one crowding agent. A crowding agent may reduce the volume of solvent available for other molecules in the solution, thereby increasing the effective concentrations of said molecules. Exemplary crowding agents include glycerol and bovine serum albumin. In some embodiments, the crowding agent is glycerol. In some embodiments, the concentration of the crowding agent in the solution is 0.01% (v/v) to 10% (v/v). In some embodiments, the concentration of the crowding agent in the solution is 0.5% (v/v) to 10% (v/v).

[0350] In some embodiments, systems comprise a solution, wherein the solution comprises at least one detergent. Exemplary detergents include Tween, Triton-X, and IGEPAL. A solution may comprise Tween, Triton-X, or any combination thereof. A solution may comprise Triton-X. A solution may comprise IGEPAL CA-630. In some embodiments, the concentration of the detergent in the solution is 2% (v/v) or less. In some embodiments, the concentration of the detergent in the solution is 1% (v/v) or less. In some embodiments, the concentration of the detergent in the solution is 0.00001% (v/v) to 0.01% (v/v). In some embodiments, the concentration of the detergent in the solution is about 0.01% (v/v).

[0351] In some embodiments, systems comprise a solution, wherein the solution comprises at least one reducing agent. Exemplary reducing agents comprise dithiothreitol (DTT), ß-mercaptoethanol (BME), or tris(2-carboxyethyl) phosphine (TCEP). In some embodiments, the reducing agent is DTT. In some embodiments, the concentration of the reducing agent in the solution is 0.01 mM to 100 mM. In some embodiments, the concentration of the reducing agent in the solution is 0.1 mM to 10 mM. In some embodiments, the concentration of the reducing agent in the solution is 0.5 mM to 2 mM. In some embodiments, the concentration of the reducing agent in the solution is 0.01 mM to 100 mM. In some embodiments, the concentration of the reducing agent in the solution is 0.1 mM to 10 mM. In some embodiments, the concentration of the reducing agent in the solution is about 1 mM.

[0352] In some embodiments, systems comprise a solution, wherein the solution comprises a competitor. In general, competitors compete with the target nucleic acid or the reporter nucleic acid for cleavage by the effector protein or a dimer thereof. Exemplary competitors include heparin, and imidazole, and salmon sperm DNA. In some embodiments, the concentration of the competitor in the solution is 1 μg/mL to 100 μg/mL. In some embodiments, the concentration of the competitor in the solution is 40 μg/mL to 60 μg/mL.

[0353] In some embodiments, systems comprise a solution, wherein the solution comprises a co-factor. In some embodiments, the co-factor allows an effector protein or a multimeric complex thereof to perform a function, including pre-crRNA processing and/or target nucleic acid cleavage. The suitability of a cofactor for an effector protein or a multimeric complex thereof may be assessed, such as by methods based on those described by Sundaresan et al. (Cell Rep. 2017 Dec. 26; 21(13): 3728-3739). In some embodiments, an effector or a multimeric complex thereof forms a complex with a co-factor. In some embodiments, the co-factor is a divalent metal ion. In some embodiments, the divalent metal ion is selected from Mg²⁺, Mn²⁺, Zn²⁺, Ca²⁺, Cu²⁺. In some embodiments, the divalent metal ion is Mg′. In some embodiments, the co-factor is Mg²⁺.

[0354] Reporters

[0355] In some embodiments, systems disclosed herein comprise a reporter. By way of non-limiting and illustrative example, a reporter may comprise a single stranded nucleic acid and a detection moiety (e.g., a labeled single stranded RNA reporter), wherein the nucleic acid is capable of being cleaved by an effector protein (e.g., a CRISPR/Cas protein as disclosed herein) or a multimeric complex thereof, releasing the detection moiety, and generating a detectable signal. As used herein, “reporter” is used interchangeably with “reporter nucleic acid” or “reporter molecule”. The effector proteins disclosed herein, activated upon hybridization of a guide nucleic acid to a target nucleic acid, may cleave the reporter. Cleaving the “reporter” may be referred to herein as cleaving the “reporter nucleic acid,” the “reporter molecule,” or the “nucleic acid of the reporter.” Reporters may comprise RNA. Reporters may comprise DNA. Reporters may be double-stranded. Reporters may be single-stranded.

[0356] In some embodiments, reporters comprise a protein capable of generating a signal. A signal may be a calorimetric, potentiometric, amperometric, optical (e.g., fluorescent, colorimetric, etc.), or piezo-electric signal. In some embodiments, the reporter comprises a detection moiety. Suitable detectable labels and/or moieties that may provide a signal include, but are not limited to, an enzyme, a radioisotope, a member of a specific binding pair; a fluorophore; a fluorescent protein; a quantum dot; and the like.

[0357] In some embodiments, the reporter comprises a detection moiety and a quenching moiety. In some embodiments, the reporter comprises a cleavage site, wherein the detection moiety is located at a first site on the reporter and the quenching moiety is located at a second site on the reporter, wherein the first site and the second site are separated by the cleavage site. Sometimes the quenching moiety is a fluorescence quenching moiety. In some embodiments, the quenching moiety is 5′ to the cleavage site and the detection moiety is 3′ to the cleavage site. In some embodiments, the detection moiety is 5′ to the cleavage site and the quenching moiety is 3′ to the cleavage site. Sometimes the quenching moiety is at the 5′ terminus of the nucleic acid of a reporter. Sometimes the detection moiety is at the 3′ terminus of the nucleic acid of a reporter. In some embodiments, the detection moiety is at the 5′ terminus of the nucleic acid of a reporter. In some embodiments, the quenching moiety is at the 3′ terminus of the nucleic acid of a reporter.

[0358] Suitable fluorescent proteins include, but are not limited to, green fluorescent protein (GFP) or variants thereof, blue fluorescent variant of GFP (BFP), cyan fluorescent variant of GFP (CFP), yellow fluorescent variant of GFP (YFP), enhanced GFP (EGFP), enhanced CFP (ECFP), enhanced YFP (EYFP), GFPS65T, Emerald, Topaz (TYFP), Venus, Citrine, mCitrine, GFPuv, destabilised EGFP (dEGFP), destabilised ECFP (dECFP), destabilised EYFP (dEYFP), mCFPm, Cerulean, T-Sapphire, CyPet, YPet, mKO, HcRed, t-HcRed, DsRed, DsRed2, DsRed-monomer, J-Red, dimer2, t-dimer2(12), mRFP1, pocilloporin, Renilla GFP, Monster GFP, paGFP, Kaede protein and kindling protein, Phycobiliproteins and Phycobiliprotein conjugates including B-Phycoerythrin, R-Phycoerythrin and Allophycocyanin. Suitable enzymes include, but are not limited to, horseradish peroxidase (HRP), alkaline phosphatase (AP), beta-galactosidase (GAL), glucose-6-phosphate dehydrogenase, beta-N-acetylglucosaminidase, glucuronidase, invertase, Xanthine Oxidase, firefly luciferase, and glucose oxidase (GO).

[0359] In some embodiments, the detection moiety comprises an invertase. The substrate of the invertase may be sucrose. A DNS reagent may be included in the system to produce a colorimetric change when the invertase converts sucrose to glucose. In some embodiments, the reporter nucleic acid and invertase are conjugated using a heterobifunctional linker via sulfo-SMCC chemistry.

[0360] Suitable fluorophores may provide a detectable fluorescence signal in the same range as 6-Fluorescein (Integrated DNA Technologies), IRDye 700 (Integrated DNA Technologies), TYE 665 (Integrated DNA Technologies), Alex Fluor 594 (Integrated DNA Technologies), or ATTO TM 633 (NHS Ester) (Integrated DNA Technologies). Non-limiting examples of fluorophores are fluorescein amidite, 6-Fluorescein, IRDye 700, TYE 665, Alex Fluor 594, or ATTO TM 633 (NHS Ester). The fluorophore may be an infrared fluorophore. The fluorophore may emit fluorescence in the range of 500 nm and 720 nm. In some embodiments, the fluorophore emits fluorescence at a wavelength of 700 nm or higher. In other embodiments, the fluorophore emits fluorescence at about 665 nm. In some embodiments, the fluorophore emits fluorescence in the range of 500 nm to 520 nm, 500 nm to 540 nm, 500 nm to 590 nm, 590 nm to 600 nm, 600 nm to 610 nm, 610 nm to 620 nm, 620 nm to 630 nm, 630 nm to 640 nm, 640 nm to 650 nm, 650 nm to 660 nm, 660 nm to 670 nm, 670 nm to 680 nm, 690 nm to 690 nm, 690 nm to 700 nm, 700 nm to 710 nm, 710 nm to 720 nm, or 720 nm to 730 nm. In some embodiments, the fluorophore emits fluorescence in the range 450 nm to 750 nm, 500 nm to 650 nm, or 550 to 650 nm.

[0361] Systems may comprise a quenching moiety. A quenching moiety may be chosen based on its ability to quench the detection moiety. A quenching moiety may be a non-fluorescent fluorescence quencher. A quenching moiety may quench a detection moiety that emits fluorescence in the range of 500 nm and 720 nm. A quenching moiety may quench a detection moiety that emits fluorescence in the range of 500 nm and 720 nm. In some embodiments, the quenching moiety quenches a detection moiety that emits fluorescence at a wavelength of 700 nm or higher. In other embodiments, the quenching moiety quenches a detection moiety that emits fluorescence at about 660 nm or about 670 nm. In some embodiments, the quenching moiety quenches a detection moiety that emits fluorescence in the range of 500 to 520, 500 to 540, 500 to 590, 590 to 600, 600 to 610, 610 to 620, 620 to 630, 630 to 640, 640 to 650, 650 to 660, 660 to 670, 670 to 680, 690 to 690, 690 to 700, 700 to 710, 710 to 720, or 720 to 730 nm. In some embodiments, the quenching moiety quenches a detection moiety that emits fluorescence in the range 450 nm to 750 nm, 500 nm to 650 nm, or 550 to 650 nm. A quenching moiety may quench fluorescein amidite, 6-Fluorescein, IRDye 700, TYE 665, Alex Fluor 594, or ATTO TM 633 (NHS Ester). A quenching moiety may be Iowa Black RQ, Iowa Black FQ or IRDye QC-1 Quencher. A quenching moiety may quench fluorescein amidite, 6-Fluorescein (Integrated DNA Technologies), IRDye 700 (Integrated DNA Technologies), TYE 665 (Integrated DNA Technologies), Alex Fluor 594 (Integrated DNA Technologies), or ATTO TM 633 (NHS Ester) (Integrated DNA Technologies). A quenching moiety may be Iowa Black RQ (Integrated DNA Technologies), Iowa Black FQ (Integrated DNA Technologies) or IRDye QC-1 Quencher (LiCor). Any of the quenching moieties described herein may be from any commercially available source, may be an alternative with a similar function, a generic, or a non-tradename of the quenching moieties listed.

[0362] The generation of the detectable signal from the release of the detection moiety may indicate that cleavage by the effector protein has occurred and that the sample contains the target nucleic acid. In some embodiments, the detection moiety comprises a fluorescent dye. Sometimes the detection moiety comprises a fluorescence resonance energy transfer (FRET) pair. In some embodiments, the detection moiety comprises an infrared (IR) dye. In some embodiments, the detection moiety comprises an ultraviolet (UV) dye. Alternatively, or in combination, the detection moiety comprises a protein. Sometimes the detection moiety comprises a biotin. Sometimes the detection moiety comprises at least one of avidin or streptavidin. In some embodiments, the detection moiety comprises a polysaccharide, a polymer, or a nanoparticle. In some embodiments, the detection moiety comprises a gold nanoparticle or a latex nanoparticle.

[0363] A detection moiety may be any moiety capable of generating a calorimetric, potentiometric, amperometric, optical (e.g., fluorescent, colorimetric, etc.), or piezo-electric signal. A nucleic acid of a reporter, sometimes, is protein-nucleic acid that is capable of generating a calorimetric, potentiometric, amperometric, optical (e.g., fluorescent, colorimetric, etc.), or piezo-electric signal upon cleavage of the nucleic acid. Often a calorimetric signal is heat produced after cleavage of the nucleic acids of a reporter. Sometimes, a calorimetric signal is heat absorbed after cleavage of the nucleic acids of a reporter. A potentiometric signal, for example, is electrical potential produced after cleavage of the nucleic acids of a reporter. An amperometric signal may be movement of electrons produced after the cleavage of nucleic acid of a reporter. Often, the signal is an optical signal, such as a colorimetric signal or a fluorescence signal. An optical signal is, for example, a light output produced after the cleavage of the nucleic acids of a reporter. Sometimes, an optical signal is a change in light absorbance between before and after the cleavage of nucleic acids of a reporter. Often, a piezo-electric signal is a change in mass between before and after the cleavage of the nucleic acid of a reporter.

[0364] The detectable signal may be a colorimetric signal or a signal visible by eye. In some embodiments, the detectable signal may be fluorescent, electrical, chemical, electrochemical, or magnetic. In some embodiments, the first detection signal may be generated by binding of the detection moiety to the capture molecule in the detection region, where the first detection signal indicates that the sample contained the target nucleic acid. Sometimes systems are capable of detecting more than one type of target nucleic acid, wherein the system comprises more than one type of guide nucleic acid and more than one type of reporter nucleic acid. In some embodiments, the detectable signal may be generated directly by the cleavage event. Alternatively, or in combination, the detectable signal may be generated indirectly by the signal event. Sometimes the detectable signal is not a fluorescent signal. In some embodiments, the detectable signal may be a colorimetric or color-based signal. In some embodiments, the detected target nucleic acid may be identified based on its spatial location on the detection region of the support medium. In some embodiments, the second detectable signal may be generated in a spatially distinct location than the first generated signal.

[0365] In some embodiments, the reporter nucleic acid is a single-stranded nucleic acid sequence comprising ribonucleotides. The nucleic acid of a reporter may be a single-stranded nucleic acid sequence comprising at least one ribonucleotide. In some embodiments, the nucleic acid of a reporter is a single-stranded nucleic acid comprising at least one ribonucleotide residue at an internal position that functions as a cleavage site. In some embodiments, the nucleic acid of a reporter comprises at least 2, at least 3, at least 4, at least 5, at least 6, at least 7, at least 8, at least 9, or at least 10 ribonucleotide residues at an internal position. In some embodiments, the nucleic acid of a reporter comprises from 2 to 10, from 3 to 9, from 4 to 8, or from 5 to 7 ribonucleotide residues at an internal position. Sometimes the ribonucleotide residues are continuous. Alternatively, the ribonucleotide residues are interspersed in between non-ribonucleotide residues. In some embodiments, the nucleic acid of a reporter has only ribonucleotide residues. In some embodiments, the nucleic acid of a reporter has only DNA residues. In some embodiments, the nucleic acid comprises nucleotides resistant to cleavage by the effector protein described herein. In some embodiments, the nucleic acid of a reporter comprises synthetic nucleotides. In some embodiments, the nucleic acid of a reporter comprises at least one ribonucleotide residue and at least one non-ribonucleotide residue.

[0366] In some embodiments, the nucleic acid of a reporter comprises at least one uracil ribonucleotide. In some embodiments, the nucleic acid of a reporter comprises at least two uracil ribonucleotides. Sometimes the nucleic acid of a reporter has only uracil ribonucleotides. In some embodiments, the nucleic acid of a reporter comprises at least one adenine ribonucleotide. In some embodiments, the nucleic acid of a reporter comprises at least two adenine ribonucleotides. In some embodiments, the nucleic acid of a reporter has only adenine ribonucleotides. In some embodiments, the nucleic acid of a reporter comprises at least one cytosine ribonucleotide. In some embodiments, the nucleic acid of a reporter comprises at least two cytosine ribonucleotides. In some embodiments, the nucleic acid of a reporter comprises at least one guanine ribonucleotide. In some embodiments, the nucleic acid of a reporter comprises at least two guanine ribonucleotides. In some embodiments, a nucleic acid of a reporter comprises a single unmodified ribonucleotide. In some embodiments, a nucleic acid of a reporter comprises only unmodified DNAs.

[0367] In some embodiments, the nucleic acid of a reporter is 5 to 20, 5 to 15, 5 to 10, 7 to 20, 7 to 15, or 7 to 10 nucleotides in length. In some embodiments, the nucleic acid of a reporter is 3 to 20, 4 to 10, 5 to 10, or 5 to 8 nucleotides in length. In some embodiments, the nucleic acid of a reporter is 5 to 12 nucleotides in length. In some embodiments, the reporter nucleic acid is at least 2, at least 3, at least 4, at least 5, at least 6, at least 7, at least 8, at least 9, at least 10, at least 11, at least 12, at least 13, at least 14, at least 15, at least 16, at least 17, at least 18, at least 19, at least 20, at least 21, at least 22, at least 23, at least 24, at least 25, at least 26, at least 27, at least 28, at least 29, or at least 30 nucleotides in length. In some embodiments, the reporter nucleic acid is 2, 3, 4, 5, 6, 7, 8, 9, 10, 11, 12, 13, 14, 15, 16, 17, 18, 19, 20, 21, 22, 23, 24, 25, 26, 27, 28, 29, or 30 nucleotides in length.

[0368] In some embodiments, systems comprise a plurality of reporters. The plurality of reporters may comprise a plurality of signals. In some embodiments, systems comprise at least 2, at least 3, at least 4, at least 5, at least 6, at least 7, at least 8, at least 9, at least 10, at least 11, at least 12, at least 13, at least 14, at least 15, at least 20, at least 30, at least 40, or at least 50 reporters. In some embodiments, there are 2 to 50, 3 to 40, 4 to 30, 5 to 20, or 6 to 10 different reporters.

[0369] In some embodiments, systems comprise an effector protein and a reporter nucleic acid configured to undergo trans cleavage by the effector protein. Trans cleavage of the reporter may generate a signal from the reporter or alter a signal from the reporter. In some embodiments, the signal is an optical signal, such as a fluorescence signal or absorbance band. Trans cleavage of the reporter may alter the wavelength, intensity, or polarization of the optical signal. For example, the reporter may comprise a fluorophore and a quencher, such that trans cleavage of the reporter separates the fluorophore and the quencher thereby increasing a fluorescence signal from the fluorophore. Herein, detection of reporter cleavage to determine the presence of a target nucleic acid may be referred to as ‘DETECTR’. In some embodiments described herein is a method of assaying for a target nucleic acid in a sample comprising contacting the target nucleic acid with an effector protein, a non-naturally occurring guide nucleic acid that hybridizes to a segment of the target nucleic acid, and a reporter nucleic acid, and assaying for a change in a signal, wherein the change in the signal is produced by cleavage of the reporter nucleic acid.

[0370] In the presence of a large amount of non-target nucleic acids, an activity of an effector protein (e.g., an effector protein as disclosed herein) may be inhibited. This is because the activated effector proteins collaterally cleave any nucleic acids. If total nucleic acids are present in large amounts, they may outcompete reporters for the effector proteins. In some embodiments, systems comprise an excess of reporter(s), such that when the system is operated and a solution of the system comprising the reporter is combined with a sample comprising a target nucleic acid, the concentration of the reporter in the combined solution-sample is greater than the concentration of the target nucleic acid. In some embodiments, the sample comprises amplified target nucleic acid. In some embodiments, the sample comprises an unamplified target nucleic acid. In some embodiments, the concentration of the reporter is greater than the concentration of target nucleic acids and non-target nucleic acids. The non-target nucleic acids may be from the original sample, either lysed or unlysed. The non-target nucleic acids may comprise byproducts of amplification. In some embodiments, systems comprise a reporter wherein the concentration of the reporter in a solution 1.5 fold, at least 2 fold, at least 3 fold, at least 4 fold, at least 5 fold, at least 6 fold, at least 7 fold, at least 8 fold, at least 9 fold, at least 10 fold, at least 11 fold, at least 12 fold, at least 13 fold, at least 14 fold, at least 15 fold, at least 16 fold, at least 17 fold, at least 18 fold, at least 19 fold, at least 20 fold, at least 30 fold, at least 40 fold, at least 50 fold, at least 60 fold, at least 70 fold, at least 80 fold, at least 90 fold, at least 100 fold excess of total nucleic acids.

[0371] Amplification Reagents/Components

[0372] In some embodiments, systems described herein comprise a reagent or component for amplifying a nucleic acid. Non-limiting examples of reagents for amplifying a nucleic acid include polymerases, primers, and nucleotides. In some embodiments, systems comprise reagents for nucleic acid amplification of a target nucleic acid in a sample. Nucleic acid amplification of the target nucleic acid may improve at least one of sensitivity, specificity, or accuracy of the assay in detecting the target nucleic acid. In some embodiments, nucleic acid amplification is isothermal nucleic acid amplification, providing for the use of the system or system in remote regions or low resource settings without specialized equipment for amplification. In some embodiments, amplification of the target nucleic acid increases the concentration of the target nucleic acid in the sample relative to the concentration of nucleic acids that do not correspond to the target nucleic acid.

[0373] The reagents for nucleic acid amplification may comprise a recombinase, an oligonucleotide primer, a single-stranded DNA binding (SSB) protein, a polymerase, or a combination thereof that is suitable for an amplification reaction. Non-limiting examples of amplification reactions are transcription mediated amplification (TMA), helicase dependent amplification (HDA), or circular helicase dependent amplification (cHDA), strand displacement amplification (SDA), recombinase polymerase amplification (RPA), loop mediated amplification (LAMP), exponential amplification reaction (EXPAR), rolling circle amplification (RCA), ligase chain reaction (LCR), simple method amplifying RNA targets (SMART), single primer isothermal amplification (SPIA), multiple displacement amplification (MDA), nucleic acid sequence based amplification (NASBA), hinge-initiated primer-dependent amplification of nucleic acids (HIP), nicking enzyme amplification reaction (NEAR), and improved multiple displacement amplification (IMDA).

[0374] In some embodiments, systems comprise a PCR tube, a PCR well or a PCR plate. The wells of the PCR plate may be pre-aliquoted with the reagent for amplifying a nucleic acid, as well as a guide nucleic acid, an effector protein, a multimeric complex, or any combination thereof. The wells of the PCR plate may be pre-aliquoted with a guide nucleic acid targeting a target sequence, an effector protein capable of being activated when complexed with the guide nucleic acid and the target sequence, and at least one population of a single stranded reporter nucleic acid comprising a detection moiety. A user may thus add the biological sample of interest to a well of the pre-aliquoted PCR plate and measure for the detectable signal with a fluorescent light reader or a visible light reader.

[0375] In some embodiments, systems comprise a PCR plate; a guide nucleic acid targeting a target sequence; an effector protein capable of being activated when complexed with the guide nucleic acid and the target sequence; and a single stranded reporter nucleic acid comprising a detection moiety, wherein the reporter nucleic acid is capable of being cleaved by the activated nuclease, thereby generating a detectable signal.

[0376] In some embodiments, systems comprise a support medium; a guide nucleic acid targeting a target sequence; and an effector protein capable of being activated when complexed with the guide nucleic acid and the target sequence. In some embodiments, nucleic acid amplification is performed in a nucleic acid amplification region on the support medium. Alternatively, or in combination, the nucleic acid amplification is performed in a reagent chamber, and the resulting sample is applied to the support medium.

[0377] In some embodiments, a system for modifying a target nucleic acid comprises a PCR plate; a guide nucleic acid targeting a target sequence; and an effector protein capable of being activated when complexed with the guide nucleic acid and the target sequence. The wells of the PCR plate may be pre-aliquoted with the guide nucleic acid targeting a target sequence, and an effector protein capable of being activated when complexed with the guide nucleic acid and the target sequence. A user may thus add the biological sample of interest to a well of the pre-aliquoted PCR plate.

[0378] Often, the nucleic acid amplification is performed for no greater than 1, 2, 3, 4, 5, 6, 7, 8, 9, 10, 11, 12, 13, 14, 15, 16, 17, 18, 19, 20, 25, 30, 40, 50, or 60 minutes, or any value 1 to 60 minutes. Sometimes, the nucleic acid amplification is performed for 1 to 60, 5 to 55, 10 to 50, 15 to 45, 20 to 40, or 25 to 35 minutes. Sometimes, the nucleic acid amplification reaction is performed at a temperature of around 20-45° C. In some embodiments, the nucleic acid amplification reaction is performed at a temperature no greater than 20° C., 25° C., 30° C., 35° C., 37° C., 40° C., 45° C., or any value 20° C. to 45° C. In some embodiments, the nucleic acid amplification reaction is performed at a temperature of at least 20° C., 25° C., 30° C., 35° C., 37° C., 40° C., or 45° C., or any value 20° C. to 45° C. In some embodiments, the nucleic acid amplification reaction is performed at a temperature of 20° C. to 45° C., 25° C. to 40° C., 30° C. to 40° C., or 35° C. to 40° C.

[0379] Often, systems comprise primers for amplifying a target nucleic acid to produce an amplification product comprising the target nucleic acid and a PAM. For embodiment, at least one of the primers may comprise the PAM that is incorporated into the amplification product during amplification. The compositions for amplification of target nucleic acids and methods of use thereof, as described herein, are compatible with any of the methods disclosed herein including methods of assaying for at least one base difference (e.g., assaying for a SNP or a base mutation) in a target nucleic acid, methods of assaying for a target nucleic acid that lacks a PAM by amplifying the target nucleic acid to introduce a PAM, and compositions used in introducing a PAM via amplification into the target nucleic acid.

[0380] Additional System Components

[0381] In some embodiments, systems include a package, carrier, or container that is compartmentalized to receive one or more containers such as vials, tubes, and the like, each of the container(s) comprising one of the separate elements to be used in a method described herein. Suitable containers include, for example, test wells, bottles, vials, and test tubes. In one embodiment, the containers are formed from a variety of materials such as glass, plastic, or polymers. The system or systems described herein contain packaging materials. Examples of packaging materials include, but are not limited to, pouches, blister packs, bottles, tubes, bags, containers, bottles, and any packaging material suitable for intended mode of use.

[0382] A system may include labels listing contents and/or instructions for use, or package inserts with instructions for use. A set of instructions will also typically be included. In one embodiment, a label is on or associated with the container. In some embodiments, a label is on a container when letters, numbers or other characters forming the label are attached, molded, or etched into the container itself; a label is associated with a container when it is present within a receptacle or carrier that also holds the container, e.g., as a package insert. In one embodiment, a label is used to indicate that the contents are to be used for a specific therapeutic application. The label also indicates directions for use of the contents, such as in the methods described herein. After packaging the formed product and wrapping or boxing to maintain a sterile barrier, the product may be terminally sterilized by heat sterilization, gas sterilization, gamma irradiation, or by electron beam sterilization. Alternatively, the product may be prepared and packaged by aseptic processing.

[0383] In some embodiments, systems comprise a solid support. An RNP or effector protein may be attached to a solid support. The solid support may be an electrode or a bead. The bead may be a magnetic bead. Upon cleavage, the RNP is liberated from the solid support and interacts with other mixtures. For example, upon cleavage of the nucleic acid of the RNP, the effector protein of the RNP flows through a chamber into a mixture comprising a substrate. When the effector protein meets the substrate, a reaction occurs, such as a colorimetric reaction, which is then detected. As another example, the protein is an enzyme substrate, and upon cleavage of the nucleic acid of the enzyme substrate-nucleic acid, the enzyme flows through a chamber into a mixture comprising the enzyme. When the enzyme substrate meets the enzyme, a reaction occurs, such as a calorimetric reaction, which is then detected.

[0384] Certain System Conditions

[0385] In some embodiments, systems and methods are employed under certain conditions that enhance an activity of the effector protein relative to alternative conditions, as measured by a detectable signal released from cleavage of a reporter in the presence of the target nucleic acid. The detectable signal may be generated at about the rate of trans cleavage of a reporter nucleic acid. In some embodiments, the reporter nucleic acid is a homopolymeric reporter nucleic acid comprising 5 to 20 consecutive adenines (SEQ ID NO: 1019), 5 to 20 consecutive thymines (SEQ ID NO: 1020), 5 to 20 consecutive cytosines (SEQ ID NO: 1021), or 5 to 20 consecutive guanines (SEQ ID NO: 1022). In some embodiments, the reporter is an RNA-FQ reporter.

[0386] In some embodiments, effector proteins disclosed herein recognize, bind, or are activated by, different target nucleic acids having different sequences, but are active toward the same reporter nucleic acid, allowing for facile multiplexing in a single assay having a single ssRNA-FQ reporter.

[0387] In some embodiments, systems are employed under certain conditions that enhance trans cleavage activity of an effector protein. In some embodiments, under certain conditions, transcolatteral cleavage occurs at a rate of at least 0.005 mmol/min, at least 0.01 mmol/min, at least 0.05 mmol/min, at least 0.1 mmol/min, at least 0.2 mmol/min, at least 0.5 mmol/min, or at least 1 mmol/min. In some embodiments, systems and methods are employed under certain conditions that enhance cis-cleavage activity of the effector protein.

[0388] Certain conditions that may enhance the activity of an effector protein include a certain salt presence or salt concentration of the solution in which the activity occurs. For example, cis-cleavage activity of an effector protein may be inhibited or halted by a high salt concentration. The salt may be a sodium salt, a potassium salt, or a magnesium salt. In some embodiments, the salt is NaCl. In some embodiments, the salt is KNO3. In some embodiments, the salt concentration is less than 150 mM, less than 125 mM, less than 100 mM, less than 75 mM, less than 50 mM, or less than 25 mM.

[0389] Certain conditions that may enhance the activity of an effector protein include the pH of a solution in which the activity. For example, increasing pH may enhance trans cleavage activity. For example, the rate of trans cleavage activity may increase with increase in pH up to pH 9. In some embodiments, the pH is about 7, about 7.1, about 7.2, about 7.3, about 7.4, about 7.5, about 7.6, about 7.7, about 7.8, about 7.9, about 8, about 8.1, about 8.2, about 8.3, about 8.4, about 8.5, about 8.6, about 8.7, about 8.8, about 8.9, or about 9. In some embodiments, the pH is 7 to 7.5, 7.5 to 8, 8 to 8.5, 8.5 to 9, or 7 to 8.5. In some embodiments, the pH is less than 7. In some embodiments, the pH is greater than 7.

[0390] Certain conditions that may enhance the activity of an effector protein includes the temperature at which the activity is performed. In some embodiments, the temperature is about 25° C. to about 50° C. In some embodiments, the temperature is about 20° C. to about 40° C., about 30° C. to about 50° C., or about 40° C. to about 60° C. In some embodiments, the temperature is about 25° C., about 30° C., about 35° C., about 40° C., about 45° C., or about 50° C.

### X. PHARMACEUTICAL COMPOSITIONS AND MODES OF ADMINISTRATION

[0391] Disclosed herein, in some aspects, are pharmaceutical compositions for modifying a target nucleic acid in a cell or a subject, comprising any one of the effector proteins, engineered effector proteins, fusion effector proteins, or guide nucleic acids as described herein and any combination thereof. Also disclosed herein, in some aspects, are pharmaceutical compositions comprising a nucleic acid encoding any one of the effector proteins, engineered effector proteins, fusion effector proteins, or guide nucleic acids as described herein and any combination thereof. In some embodiments, pharmaceutical compositions comprise a plurality of guide nucleic acids. Pharmaceutical compositions may be used to modify a target nucleic acid or the expression thereof in a cell in vitro, in vivo or ex vivo.

[0392] In some embodiments, pharmaceutical compositions comprise one or more nucleic acids encoding an effector protein, fusion effector protein, fusion partner, a guide nucleic acid, or a combination thereof; and a pharmaceutically acceptable carrier or diluent. The effector protein, fusion effector protein, fusion partner protein, or combination thereof may be any one of those described herein. The one or more nucleic acids may comprise a plasmid. The one or more nucleic acids may comprise a nucleic acid expression vector. The one or more nucleic acids may comprise a viral vector. In some embodiments, the viral vector is a lentiviral vector. In some embodiments, the vector is an adeno-associated viral (AAV) vector. In some embodiments, compositions, including pharmaceutical compositions, comprise a viral vector encoding a fusion effector protein and a guide nucleic acid, wherein at least a portion of the guide nucleic acid binds to the effector protein of the fusion effector protein.

[0393] In some embodiments, pharmaceutical compositions comprise a virus comprising a viral vector encoding a fusion effector protein, an effector protein, a fusion partner, a guide nucleic acid, or a combination thereof; and a pharmaceutically acceptable carrier or diluent. The virus may be a lentivirus. The virus may be an adenovirus. The virus may be a non-replicating virus. The virus may be an adeno-associated virus (AAV). The viral vector may be a retroviral vector. Retroviral vectors may include gamma-retroviral vectors such as vectors derived from the Moloney Murine Leukemia Virus (MoMLV, MMLV, MuLV, or MLV) or the Murine Stem cell Virus (MSCV) genome. Retroviral vectors may include lentiviral vectors such as those derived from the human immunodeficiency virus (HIV) genome. In some embodiments, the viral vector is a chimeric viral vector, comprising viral portions from two or more viruses. In some embodiments, the viral vector is a recombinant viral vector.

[0394] In some embodiments, the viral vector is an AAV. The AAV may be any AAV known in the art. In some embodiments, the viral vector corresponds to a virus of a specific serotype. In some examples, the serotype is selected from an AAV1 serotype, an AAV2 serotype, AAV3 serotype, an AAV4 serotype, AAV5 serotype, an AAV6 serotype, AAV7 serotype, an AAV8 serotype, an AAV9 serotype, an AAV10 serotype, an AAV11 serotype, and an AAV12 serotype. In some embodiments the AAV vector is a recombinant vector, a hybrid AAV vector, a chimeric AAV vector, a self-complementary AAV (scAAV) vector, a single-stranded AAV or any combination thereof scAAV genomes are generally known in the art and contain both DNA strands which may anneal together to form double-stranded DNA.

[0395] In some embodiments, methods of producing delivery vectors herein comprise packaging a nucleic acid encoding an effector protein and a nucleic acid that, when transcribed, produces a guide nucleic acid, or a combination thereof, into an AAV vector. In some embodiments, methods of producing the delivery vector comprises, (a) contacting a cell with at least one nucleic acid that, when transcribed, produces a guide nucleic acid; at least one nucleic acid that encodes: (i) a Replication (Rep) gene; and (ii) a Capsid (Cap) gene that encodes an AAV capsid protein; (b) expressing the AAV capsid protein in the cell; (c) assembling an AAV particle; and (d) packaging a Cas effector encoding nucleic acid into the AAV particle, thereby generating an AAV delivery vector. In some embodiments, promoters, stuffer sequences, and any combination thereof may be packaged in the AAV vector. In some embodiments, the AAV vector comprises a sequence encoding a guide nucleic acid. In some embodiments, the guide nucleic acid comprises a crRNA. In some embodiments, the guide nucleic acid is a crRNA. In some embodiments, the guide nucleic acid comprises a sgRNA. In some embodiments, the guide nucleic acid is a sgRNA. In some examples, the AAV vector may package 1, 2, 3, 4, or 5 nucleotide sequences encoding guide nucleic acids or copies thereof. In some examples, the AAV vector packages 1 or 2 nucleotide sequences encoding guide nucleic acids or copies thereof. In some embodiments, the AAV vector packages a nucleotide sequence encoding a first guide nucleic acid and a nucleotide sequence encoding a second guide nucleic acid, wherein the first guide nucleic acid and the second guide nucleic acid are the same. In some embodiments, the AAV vector packages a nucleotide sequence encoding a first guide nucleic acid and a nucleotide sequence encoding a second guide nucleic acid, wherein the first guide nucleic acid and the second guide nucleic acid are different. In some embodiments, the AAV vector comprises inverted terminal repeats, e.g., a 5′ inverted terminal repeat and a 3′ inverted terminal repeat. In some embodiments, the inverted terminal repeat comprises inverted terminal repeats from AAV. In some embodiments, the inverted terminal repeat comprises inverted terminal repeats of ssAAV vector or scAAV vector. In some embodiments, the AAV vector comprises a mutated inverted terminal repeat that lacks a terminal resolution site.

[0396] In some embodiments, a hybrid AAV vector is produced by transcapsidation, e.g., packaging an inverted terminal repeat (ITR) from a first serotype into a capsid of a second serotype, wherein the first and second serotypes may be not the same. In some examples, the Rep gene and ITR from a first AAV serotype (e.g., AAV2) may be used in a capsid from a second AAV serotype (e.g., AAV9), wherein the first and second AAV serotypes may be not the same. As a non-limiting example, a hybrid AAV serotype comprising the AAV2 ITRs and AAV9 capsid protein may be indicated AAV2/9. In some examples, the hybrid AAV delivery vector comprises an AAV2/1, AAV2/2, AAV 2/4, AAV2/5, AAV2/8, or AAV2/9 vector.

[0397] In some embodiments, the AAV vector may be a chimeric AAV vector. In some embodiments, the chimeric AAV vector comprises an exogenous amino acid or an amino acid substitution, or capsid proteins from two or more serotypes. In some examples, a chimeric AAV vector may be genetically engineered to increase transduction efficiency, selectivity, or a combination thereof.

[0398] In some examples, the delivery vector may be a eukaryotic vector, a prokaryotic vector (e.g., a bacterial vector) a viral vector, or any combination thereof. In some embodiments, the delivery vehicle may be a non-viral vector. In some embodiments, the delivery vehicle may be a plasmid. In some embodiments, the plasmid comprises DNA. In some embodiments, the plasmid comprises RNA. In some examples, the plasmid comprises circular double-stranded DNA. In some examples, the plasmid may be linear. In some examples, the plasmid comprises one or more genes of interest and one or more regulatory elements. In some examples, the plasmid comprises a bacterial backbone containing an origin of replication and an antibiotic resistance gene or other selectable marker for plasmid amplification in bacteria. In some examples, the plasmid may be a minicircle plasmid. In some examples, the plasmid contains one or more genes that provide a selective marker to induce a target cell to retain the plasmid. In some examples, the plasmid may be formulated for delivery through injection by a needle carrying syringe. In some examples, the plasmid may be formulated for delivery via electroporation. In some examples, the plasmids may be engineered through synthetic or other suitable means known in the art. For example, in some embodiments, the genetic elements may be assembled by restriction digest of the desired genetic sequence from a donor plasmid or organism to produce ends of the DNA which may then be readily ligated to another genetic sequence.

[0399] In some embodiments, the vector is a non-viral vector, and a physical method or a chemical method is employed for delivery into the somatic cell. Exemplary physical methods include electroporation, gene gun, sonoporation, magnetofection, or hydrodynamic delivery. Exemplary chemical methods include delivery of the recombinant polynucleotide via liposomes such as, cationic lipids or neutral lipids; dendrimers; nanoparticles; or cell-penetrating peptides.

[0400] In some embodiments, a fusion effector protein as described herein is inserted into a vector. In some embodiments, the vector comprises a nucleotide sequence of one or more promoters, enhancers, ribosome binding sites, RNA splice sites, polyadenylation sites, a replication origin, and/or transcriptional terminator sequences.

[0401] In some embodiments, the AAV vector comprises a self-processing array system for guide nucleic acid. Such a self-processing array system refers to a system for multiplexing, stringing together multiple guide nucleic acids under the control of a single promoter. In general, plasmids and vectors described herein comprise at least one promoter. In some embodiments, the promoters are constitutive promoters. In other embodiments, the promoters are inducible promoters. In additional embodiments, the promoters are prokaryotic promoters (e.g., drive expression of a gene in a prokaryotic cell). In some embodiments, the promoters are eukaryotic promoters, (e.g., drive expression of a gene in a eukaryotic cell). Exemplary promoters include, but are not limited to, CMV, EF1a, SV40, PGK1, Ubc, human beta actin, CAG, TRE, UAS, Ac5, polyhedron, CaMKIIa, GALL-10, TEF1, GDS, ADH1, CaMV35S, Ubi, H1, U6, CaMV35S, SV40, CMV, 7SK, and HSV TK promoter. In some embodiments, the promoter is CMV. In some embodiments, the promoter is EF1a. In some embodiments, the promoter is U6. In some embodiments, the promote is H1. In some embodiments, the promoter is 7SK. In some embodiments, the promoter is ubiquitin. In some embodiments, vectors are bicistronic or polycistronic vector (e.g., having or involving two or more loci responsible for generating a protein) having an internal ribosome entry site (IRES) is for translation initiation in a cap-independent manner.

[0402] In some embodiments, the AAV vector comprises a promoter for expressing effector proteins. In some embodiments, the promoter for expressing effector protein is a site-specific promoter. In some embodiments, the promoter for expressing effector protein is a muscle-specific promoter. In some embodiments, the muscle-specific promoter comprises Ck8e, SPC5-12, or Desmin promoter sequence. In some embodiments, the promoter for expressing effector protein is a ubiquitous promoter. In some embodiments, the ubiquitous promoter comprises MND or CAG promoter sequence.

[0403] In some embodiments, the AAV vector comprises a stuffer sequence. A stuffer sequence may refer to a non-coding sequence of nucleotides that adjusts the length of the viral genome when inserted into a vector to increase packaging efficiency, increase overall viral titer during production, increase transfection efficacy, increase transfection efficiency, and/or decrease vector toxicity. In some embodiments, the stuffer sequence comprises 5′ untranslated region, 3′ untranslated region or combination thereof. In some embodiments, a stuffer sequence serves no other functional purpose than to increase the length of the viral genome. In some embodiments, a stuffer sequence may increase the length of the viral genome as well as have other functional elements

[0404] In some embodiments, the 3′-untranslated region comprises a nucleotide sequence of an intron. In some embodiments, the 3′-untranslated region comprises one or more sequence elements, such as an intron sequence or an enhancer sequence. In some embodiments, the 3′-untranslated region comprises an enhancer. In some embodiments, vectors comprise an enhancer Enhancers are nucleotide sequences that have the effect of enhancing promoter activity. In some embodiments, enhancers augment transcription regardless of the orientation of their sequence. In some embodiments, enhancers activate transcription from a distance of several kilo basepairs. Furthermore, enhancers are located optionally upstream or downstream of a gene region to be transcribed, and/or located within the gene, to activate the transcription. Exemplary enhancers include, but are not limited to, WPRE; CMV enhancers; the R-U5′ segment in LTR of HTLV-I (Mol. Cell. Biol., Vol. 8(1), p. 466-472, 1988); SV40 enhancer; the intron sequence between exons 2 and 3 of rabbit 0-globin (Proc. Natl. Acad. Sci. USA., Vol. 78(3), p. 1527-31, 1981); and the genome region of human growth hormone (J Immunol., Vol. 155(3), p. 1286-95, 1995). In some embodiments, the enhancer is WPRE.

[0405] In some embodiments, the AAV vector comprises one or more polyadenylation (poly A) signal sequences. In some embodiments, the polyadenlyation signal sequence comprises hGH poly A signal sequence. In some embodiments, the polyadenlyation signal sequence comprises sv40 poly A signal sequence.

[0406] Pharmaceutical compositions described herein may comprise a salt. In some embodiments, the salt is a sodium salt. In some embodiments, the salt is a potassium salt. In some embodiments, the salt is a magnesium salt. In some embodiments, the salt is NaCl. In some embodiments, the salt is KNO3. In some embodiments, the salt is Mg²⁺SO₄²⁻.

[0407] Non-limiting examples of pharmaceutically acceptable carriers and diluents suitable for the pharmaceutical compositions disclosed herein include buffers (e.g., neutral buffered saline, phosphate buffered saline); carbohydrates (e.g., glucose, mannose, sucrose, dextran, mannitol); polypeptides or amino acids (e.g., glycine); antioxidants; chelating agents (e.g., EDTA, glutathione); adjuvants (e.g., aluminum hydroxide); surfactants (Polysorbate 80, Polysorbate 20, or Pluronic F68); glycerol; sorbitol; mannitol; polyethyleneglycol; and preservatives.

[0408] In some embodiments, pharmaceutical compositions are in the form of a solution (e.g., a liquid). The solution may be formulated for injection, e.g., intravenous or subcutaneous injection. In some embodiments, the pH of the solution is about 7, about 7.1, about 7.2, about 7.3, about 7.4, about 7.5, about 7.6, about 7.7, about 7.8, about 7.9, about 8, about 8.1, about 8.2, about 8.3, about 8.4, about 8.5, about 8.6, about 8.7, about 8.8, about 8.9, or about 9. In some embodiments, the pH is 7 to 7.5, 7.5 to 8, 8 to 8.5, 8.5 to 9, or 7 to 8.5. In some embodiments, the pH of the solution is less than 7. In some embodiments, the pH is greater than 7.

[0409] In some embodiments, pharmaceutical compositions comprise an: effector protein, fusion effector protein, fusion partner, a guide nucleic acid, or a combination thereof; and a pharmaceutically acceptable carrier or diluent. In some embodiments, pharmaceutical compositions comprise one or more nucleic acids encoding an: effector protein, fusion effector protein, fusion partner, a guide nucleic acid, or a combination thereof; and a pharmaceutically acceptable carrier or diluent. In some embodiments, guide nucleic acid may be a plurality of guide nucleic acids. In some embodiments, the effector protein comprises a sequence that is at least 65%, at least 70%, at least 75%, at least 80%, at least 85%, at least 90%, at least 95%, at least 97%, or at least 98%, at least 99%, or 100% identical to any one of the sequences of TABLE 1. In some embodiments, the guide nucleic acid may be a guide nucleic acid described herein.

### XI. METHODS AND FORMULATIONS FOR INTRODUCING SYSTEMS AND COMPOSITIONS INTO A TARGET CELL

[0410] A guide nucleic acid (or a nucleic acid comprising a nucleotide sequence encoding same) and/or an effector protein described herein may be introduced into a host cell by any of a variety of well-known methods. As a non-limiting example, a guide nucleic acid and/or effector protein may be combined with a lipid. As another non-limiting example, a guide nucleic acid and/or effector protein may be combined with a particle, or formulated into a particle.

[0411] Methods for Introducing Systems and Compositions to a Host

[0412] Described herein are methods of introducing various components described herein to a host. A host may be any suitable host, such as a host cell. When described herein, a host cell may be an in vivo or in vitro eukaryotic cell, a prokaryotic cell (e.g., bacterial or archaeal cell), or a cell from a multicellular organism (e.g., a cell line) cultured as a unicellular entity, which eukaryotic or prokaryotic cells may be, or have been, used as recipients for methods of introduction described herein, and include the progeny of the original cell which has been transformed by the methods of introduction described herein. It is understood that the progeny of a single cell may not necessarily be completely identical in morphology or in genomic or total DNA complement as the original parent, due to natural, accidental, or deliberate mutation. A host cell may be a recombinant host cell or a genetically modified host cell, if a heterologous nucleic acid, e.g., an expression vector, has been introduced into the cell.

[0413] Methods of introducing a nucleic acid and/or protein into a host cell are known in the art, and any convenient method may be used to introduce a subject nucleic acid (e.g., an expression construct/vector) into a target cell (e.g., a human cell, and the like). Suitable methods include, e.g., viral infection, transfection, conjugation, protoplast fusion, lipofection, electroporation, calcium phosphate precipitation, polyethyleneimine (PEI)-mediated transfection, DEAE-dextran mediated transfection, liposome-mediated transfection, particle gun technology, calcium phosphate precipitation, direct micro injection, nanoparticle-mediated nucleic acid delivery (see, e.g., Panyam et al. Adv Drug Deliv Rev. 2012 Sep. 13. pii: S0169-409X(12)00283-9. doi: 10.1016/j.addr.2012.09.023), and the like. In some embodiments, the nucleic acid and/or protein are introduced into a disease cell comprised in a pharmaceutical composition comprising the guide nucleic acid and/or effector protein and a pharmaceutically acceptable excipient.

[0414] In some embodiments, molecules of interest, such as nucleic acids of interest, are introduced to a host. In some embodiments, polypeptides, such as an effector protein are introduced to a host. In some embodiments, vectors, such as lipid particles and/or viral vectors may be introduced to a host. Introduction may be for contact with a host or for assimilation into the host, for example, introduction into a host cell.

[0415] In some embodiments, described herein are methods of introducing one or more nucleic acids, such as a nucleic acid encoding an effector protein, a nucleic acid that, when transcribed, produces an engineered guide nucleic acid, and/or a donor nucleic acid, or combinations thereof, into a host cell. Any suitable method may be used to introduce a nucleic acid into a cell. Suitable methods include, for example, viral infection, transfection, lipofection, electroporation, calcium phosphate precipitation, polyethyleneimine (PEI)-mediated transfection, DEAE-dextran mediated transfection, liposome-mediated transfection, particle gun technology, calcium phosphate precipitation, direct microinjection, nanoparticle-mediated nucleic acid delivery, and the like. Further methods are described throughout.

[0416] Introducing one or more nucleic acids into a host cell may occur in any culture media and under any culture conditions that promote the survival of the cells. Introducing one or more nucleic acids into a host cell may be carried out in vivo or ex vivo. Introducing one or more nucleic acids into a host cell may be carried out in vitro.

[0417] In some embodiments, an effector protein may be provided as RNA. The RNA may be provided by direct chemical synthesis or may be transcribed in vitro from a DNA (e.g., encoding the effector protein). Once synthesized, the RNA may be introduced into a cell by way of any suitable technique for introducing nucleic acids into cells (e.g., microinjection, electroporation, transfection, etc.). In some embodiments, introduction of one or more nucleic acid may be through the use of a vector and/or a vector system, accordingly, in some embodiments, compositions and system described herein comprise a vector and/or a vector system.

[0418] Vectors may be introduced directly to a host. In some embodiments, host cells may be contacted with one or more vectors as described herein, and In some embodiments, said vectors are taken up by the cells. Methods for contacting cells with vectors include but are not limited to electroporation, calcium chloride transfection, microinjection, lipofection, micro-injection, contact with the cell or particle that comprises a molecule of interest, or a package of cells or particles that comprise molecules of interest.

[0419] Components described herein may also be introduced directly to a host. For example, an engineered guide nucleic acid may be introduced to a host, specifically introduced into a host cell. Methods of introducing nucleic acids, such as RNA into cells include, but are not limited to direct injection, transfection, or any other method used for the introduction of nucleic acids.

[0420] Polypeptides (e.g., effector proteins) described herein may also be introduced directly to a host. In some embodiments, polypeptides described herein may be modified to promote introduction to a host. For example, polypeptides described herein may be modified to increase the solubility of the polypeptide. Such a polypeptide may optionally be fused to a polypeptide domain that increases solubility. The domain may be linked to the polypeptide through a defined protease cleavage site, such as TEV sequence which is cleaved by TEV protease. The linker may also include one or more flexible sequences, e.g. from 1 to 10 glycine residues. In some embodiments, the cleavage of the polypeptide is performed in a buffer that maintains solubility of the product, e.g. in the presence of from 0.5 to 2 M. urea, in the presence of polypeptides and/or polynucleotides that increase solubility, and the like. Domains of interest include endosomolytic domains, e.g. influenza HA domain; and other polypeptides that aid in production, e.g. IF2 domain, GST domain, GRPE domain, and the like. In another example, the polypeptide may be modified to improve stability. For example, the polypeptides may be PEGylated, where the polyethyleneoxy group provides for enhanced lifetime in the blood stream. Polypeptides may also be modified to promote uptake by a host, such as a host cell. For example, a polypeptide described herein may be fused to a polypeptide permeant domain to promote uptake by a host cell. Any suitable permeant domains may be used in the non-integrating polypeptides of the present disclosure, including peptides, peptidomimetics, and non-peptide carriers. Examples include penetratin, a permeant peptide may be derived from the third alpha helix of Drosophila melanogaster transcription factor Antennapaedia; the HIV-1 tat basic region amino acid sequence, e.g., amino acids 49-57 of a naturally-occurring tat protein; and poly-arginine motifs, for example, the region of amino acids 34-56 of HIV-1 rev protein, nonaarginine, octa-arginine, and the like. The site at which the fusion is made may be selected in order to optimize the biological activity, secretion or binding characteristics of the polypeptide. The optimal site may be determined by suitable methods.

[0421] Formulations for Introducing Systems and Compositions to a Host

[0422] Described herein are formulations of introducing systems and compositions described herein to a host. In some embodiments, such formulations, systems and compositions described herein comprise an effector protein and a carrier (e.g., excipient, diluent, vehicle, or filling agent). In some aspects of the present invention the effector protein is provided in a pharmaceutical composition comprising the effector protein and any pharmaceutically acceptable excipient, carrier, or diluent.

### XII. METHODS OF NUCLEIC ACID EDITING

[0423] Provided herein are compositions, methods, and systems for editing target nucleic acids. In general, editing refers to modifying the nucleotide sequence of a target nucleic acid. However, compositions, methods, and systems disclosed herein may also be capable of making epigenetic modifications of target nucleic acids. Effector proteins, compositions and systems described herein may be used for editing or modifying a target nucleic acid. Editing a target nucleic acid may comprise one or more of: cleaving the target nucleic acid, deleting one or more nucleotides of the target nucleic acid, inserting one or more nucleotides into the target nucleic acid, mutating one or more nucleotides of the target nucleic acid, or modifying (e.g., methylating, demethylating, deaminating, or oxidizing) of one or more nucleotides of the target nucleic acid.

[0424] The target nucleic acid may be a gene or a portion thereof. Methods and compositions may modify a coding portion of a gene, a non-coding portion of a gene, or a combination thereof. Modifying at least one gene using the compositions and methods described herein may reduce or increase expression of one or more genes. In some embodiments, compositions and methods reduce expression of one or more genes by at least 10%, at least 20%, at least 30%, at least 40%, at least 50%, at least 60%, at least 70%, at least 80%, at least 90%, or at least 95%. In some embodiments, compositions and methods remove all expression of a gene, also referred to as genetic knock out. In some embodiments, compositions and methods increase expression of one or more genes by at least 10%, at least 20%, at least 30%, at least 40%, at least 50%, at least 60%, at least 70%, at least 80%, at least 90%, or at least 100%.

[0425] In some embodiments, compositions and methods comprise a nucleic acid expression vector, or use thereof, to introduce an effector protein, guide nucleic acid, donor template or any combination thereof to a cell. In some embodiments, the nucleic acid expression vector is a viral vector. Viral vectors include, but are not limited to, retroviruses, adenoviruses, adeno-associated viruses, and herpes simplex viruses. In some embodiments, the viral vector is a replication-defective viral vector, comprising an insertion of a therapeutic gene inserted in genes essential to the lytic cycle, preventing the virus from replicating and exerting cytotoxic effects. In some embodiments, the viral vector is an adeno associated viral (AAV) vector. In some embodiments, the nucleic acid expression vector is a non-viral vector. In some embodiments, compositions and methods comprise a lipid, polymer, nanoparticle, or a combination thereof, or use thereof, to introduce a Cas protein, guide nucleic acid, donor template or any combination thereof to a cell. Non-limiting examples of lipids and polymers are cationic polymers, cationic lipids, or bio-responsive polymers. In some embodiments, the bio-responsive polymer exploits chemical-physical properties of the endosomal environment (e.g., pH) to preferentially release the genetic material in the intracellular space.

[0426] Methods of editing may comprise contacting a target nucleic acid with one or more components, compositions or systems described herein. In some embodiments, a method of editing comprises contacting a target nucleic acid with at least one of: a) one or more effector proteins, or one or more nucleic acids encoding one or more effector proteins; or b) one or more guide nucleic acids, or one or more nucleic acids encoding one or more guide nucleic acids. In some embodiments, a method of editing comprises contacting a target nucleic acid with a system described herein wherein the system comprises components comprising at least one of: a) one or more effector proteins, or one or more nucleic acids encoding one or more effector proteins; or b) one or more guide nucleic acids, or one or more nucleic acids encoding one or more guide nucleic acids. In some embodiments, a method of editing comprises contacting a target nucleic acid with a composition described herein comprising at least one of: a) one or more effector proteins, or one or more nucleic acids encoding one or more effector proteins; or b) one or more guide nucleic acids, or one or more nucleic acids encoding one or more guide nucleic acids; in a composition.

[0427] Editing may introduce a mutation (e.g., point mutations, deletions) in a target nucleic acid relative to a corresponding wildtype nucleotide sequence. Editing may remove or correct a disease-causing mutation in a nucleic acid sequence to produce a corresponding wildtype nucleotide sequence. Editing may remove/correct point mutations, deletions, null mutations, or tissue-specific mutations in a target nucleic acid. Editing may be used to generate gene knock-out, gene knock-in, gene editing, gene tagging, or a combination thereof. Methods of the disclosure may be targeted to any locus in a genome of a cell.

[0428] Editing may comprise single stranded cleavage, double stranded cleavage, donor nucleic acid insertion, epigenetic modification (e.g., methylation, demethylation, acetylation, or deacetylation), or a combination thereof. In some embodiments, cleavage (single-stranded or double-stranded) is site-specific, meaning cleavage occurs at a specific site in the target nucleic acid, often within the region of the target nucleic acid that hybridizes with the guide nucleic acid spacer region. In some embodiments, the effector proteins introduce a single-stranded break in a target nucleic acid to produce a cleaved nucleic acid. In some embodiments, the effector protein is capable of introducing a break in a single stranded RNA (ssRNA). The effector protein may be coupled to a guide nucleic acid that targets a particular region of interest in the ssRNA. In some embodiments, the target nucleic acid, and the resulting cleaved nucleic acid is contacted with a nucleic acid for homologous recombination (e.g., homology directed repair (HDR)) or non-homologous end joining (NHEJ). In some embodiments, a double-stranded break in the target nucleic acid may be repaired (e.g., by NHEJ or HDR) without insertion of a donor template, such that the repair results in an indel in the target nucleic acid at or near the site of the double-stranded break. In some embodiments, an indel, sometimes referred to as an insertion-deletion or indel mutation, is a type of genetic mutation that results from the insertion and/or deletion of one or more nucleotide in a target nucleic acid. An indel may vary in length (e.g., 1 to 1,000 nucleotides in length) and be detected using methods well known in the art, including sequencing. If the number of nucleotides in the insertion/deletion is not divisible by three, and it occurs in a protein coding region, it is also a frameshift mutation. Indel percentage is the percentage of sequencing reads that show at least one nucleotide has been mutation that results from the insertion and/or deletion of nucleotides regardless of the size of insertion or deletion, or number of nucleotides mutated. For example, if there is at least one nucleotide deletion detected in a given target nucleic acid, it counts towards the percent indel value. As another example, if one copy of the target nucleic acid has one nucleotide deleted, and another copy of the target nucleic acid has 10 nucleotides deleted, they are counted the same. This number reflects the percentage of target nucleic acids that are modified by a given effector protein.

[0429] In some embodiments, wherein the compositions, systems, and methods of the present disclosure comprise an additional guide nucleic acid or a use thereof, the dual-guided compositions, systems, and methods described herein may modify the target nucleic acid in two locations. In some embodiments, dual-guided editing may comprise cleavage of the target nucleic acid in the two locations targeted by the guide nucleic acids. In some embodiments, upon removal of the sequence between the guide nucleic acids, the wild-type reading frame is restored. A wild-type reading frame may be a reading frame that produces at least a partially, or fully, functional protein. A non-wild-type reading frame may be a reading frame that produces a non-functional or partially non-functional protein.

[0430] Accordingly, in some embodiments, compositions, systems, and methods described herein may edit 1 to 1,000 nucleotides or any integer in between, in a target nucleic acid. In some embodiments, 1 to 1,000, 2 to 900, 3 to 800, 4 to 700, 5 to 600, 6 to 500, 7 to 400, 8 to 300, 9 to 200, or 10 to 100 nucleotides, or any integer in between, may be edited by the compositions, systems, and methods described herein. In some embodiments, 1, 2, 3, 4, 5, 6, 7, 8, 9, 10, or more nucleotides may be edited by the compositions, systems, and methods described herein. In some embodiments, 10, 20, 30, 40, 50, 60, 70, 80 90, 100 or more nucleotides, or any integer in between, may be edited by the compositions, systems, and methods described herein. In some embodiments, 100, 200, 300, 400, 500, 600, 700, 800, 900 or more nucleotides, or any integer in between, may be edited by the compositions, systems, and methods described herein.

[0431] In some embodiments, the effector protein is fused to a chromatin-modifying enzyme. In some embodiments, the fusion protein chemically modifies the target nucleic acid, for example by methylating, demethylating, or acetylating the target nucleic acid in a sequence specific or non-specific manner.

[0432] Methods may comprise use of two or more effector proteins. An illustrative method for introducing a break in a target nucleic acid comprises contacting the target nucleic acid with: (a) a first engineered guide nucleic acid comprising a region that binds to a first effector protein described herein; and (b) a second engineered guide nucleic acid comprising a region that binds to a second effector protein described herein, wherein the first engineered guide nucleic acid comprises an additional region that binds to the target nucleic acid and wherein the second engineered guide nucleic acid comprises an additional region that binds to the target nucleic acid. The first and second effector protein may be identical or may be non-identical.

[0433] In some embodiments, editing a target nucleic acid comprises genome editing. Genome editing may comprise modifying a genome, chromosome, plasmid, or other genetic material of a cell or organism. In some embodiments, the genome, chromosome, plasmid, or other genetic material of the cell or organism is modified in vivo. In some embodiments, the genome, chromosome, plasmid, or other genetic material of the cell or organism is modified in a cell. In some embodiments, the genome, chromosome, plasmid, or other genetic material of the cell or organism is modified in vitro. For example, a plasmid may be modified in vitro using a composition described herein and introduced into a cell or organism. In some embodiments, modifying a target nucleic acid may comprise deleting a sequence from a target nucleic acid. For example, a mutated sequence or a sequence associated with a disease may be removed from a target nucleic acid. In some embodiments, modifying a target nucleic acid may comprise replacing a sequence in a target nucleic acid with a second sequence. For example, a mutated sequence or a sequence associated with a disease may be replaced with a second sequence lacking the mutation or that is not associated with the disease. In some embodiments, modifying a target nucleic acid may comprise introducing a sequence into a target nucleic acid. For example, a beneficial sequence or a sequence that may reduce or eliminate a disease may be inserted into the target nucleic acid.

[0434] In some embodiments, methods comprise inserting a donor nucleic acid into a cleaved target nucleic acid. The donor nucleic acid may be inserted at a specified (e.g., effector protein targeted) point within the target nucleic acid. In some embodiments, methods comprise contacting a target nucleic acid with an effector protein described herein, thereby introducing a single-stranded break in the target nucleic acid; contacting the target nucleic acid with a second effector protein described herein, to generate a second cleavage site in the target nucleic acid, ligating the regions flanking the first and second cleavage site, optionally through NHEJ or single-strand annealing, thereby resulting in the excision of a portion of the target nucleic acid between the first and second cleavage sites from the target nucleic acid; and contacting the target nucleic acid with a donor nucleic acid for homologous recombination, optionally via HDR or NHEJ, thereby introducing a new sequence into the target nucleic acid (e.g., at a cleavage site or in between two cleavage sites).

[0435] In some embodiments, methods comprise editing a target nucleic acid with two or more effector proteins. Editing a target nucleic acid may comprise introducing a two or more single-stranded breaks in a target nucleic acid. In some embodiments, a break may be introduced by contacting a target nucleic acid with an effector protein and a guide nucleic acid. The guide nucleic acid may bind to the effector protein and hybridize to a region of the target nucleic acid, thereby recruiting the effector protein to the region of the target nucleic acid. Binding of the effector protein to the guide nucleic acid and the region of the target nucleic acid may activate the effector protein, and the effector protein may introduce a break (e.g., a single stranded break) in the region of the target nucleic acid. In some embodiments, modifying a target nucleic acid may comprise introducing a first break in a first region of the target nucleic acid and a second break in a second region of the target nucleic acid. For example, modifying a target nucleic acid may comprise contacting a target nucleic acid with a first guide nucleic acid that binds to a first effector protein and hybridizes to a first region of the target nucleic acid and a second guide nucleic acid that binds to a second programmable nickase and hybridizes to a second region of the target nucleic acid. The first effector protein may introduce a first break in a first strand at the first region of the target nucleic acid, and the second effector protein may introduce a second break in a second strand at the second region of the target nucleic acid. In some embodiments, a segment of the target nucleic acid between the first break and the second break may be removed, thereby modifying the target nucleic acid. In some embodiments, a segment of the target nucleic acid between the first break and the second break may be replaced (e.g., with donor nucleic acid), thereby modifying the target nucleic acid.

[0436] In some embodiments, editing is achieved by fusing an effector protein to a heterologous sequence. The heterologous sequence may be a suitable fusion partner, e.g., a protein that provides recombinase activity by acting on the target nucleic acid. In some embodiments, the fusion protein comprises an effector protein fused to a heterologous sequence by a linker. The heterologous sequence or fusion partner may be a base editing domain. The base editing domain may be an ADAR1/2 or any functional variant thereof. The heterologous sequence or fusion partner may be fused to the C-terminus, N-terminus, or an internal portion (e.g., a portion other than the N- or C-terminus) of the effector protein. The heterologous sequence or fusion partner may be fused to the effector protein by a linker. A linker may be a peptide linker or a non-peptide linker. In some embodiments, the linker is an XTEN linker. In some embodiments, the linker comprises one or more repeats a tri-peptide GGS. In some embodiments, the linker is from 1 to 100 amino acids in length. In some embodiments, the linker is more 100 amino acids in length. In some embodiments, the linker is from 10 to 27 amino acids in length. A non-peptide linker may be a polyethylene glycol (PEG), polypropylene glycol (PPG), co-poly(ethylene/propylene) glycol, polyoxyethylene (POE), polyurethane, polyphosphazene, polysaccharides, dextran, polyvinyl alcohol, polyvinylpyrrolidones, polyvinyl ethyl ether, polyacrylamide, polyacrylate, polycyanoacrylates, lipid polymers, chitins, hyaluronic acid, heparin, or an alkyl linker.

[0437] Methods, systems and compositions described herein may edit or modify a target nucleic acid wherein such editing or modification may effect one or more indels. In some embodiments, where compositions, systems, and/or methods described herein effect one or more indels, then In some embodiments, the impact on the transcription and/or translation of the target nucleic acid may be predicted depending on: 1) the amount of indels generated; and 2) the location of the indel on the target nucleic acid. For example, as described herein, in some embodiments, if the amount of indels is not divisible by three, and the indels occur within or along a protein coding region, then the modification or mutation may be a frameshift mutation.

[0438] In some embodiments, if the amount of indels is divisible by three, then a frameshift mutation may not be effected, but a splicing disruption mutation and/or sequence skip mutation may be effected, such as an exon skip mutation. In some embodiments, if the amount of indels is not evenly divisible by three, then a frameshift mutation may be effected.

[0439] Methods, systems and compositions described herein may edit or modify a target nucleic acid wherein such editing or modification may be measured by indel activity. Indel activity measures the amount of change in a target nucleic acid (e.g., nucleotide deletion(s) and/or insertion(s)) compared to a target nucleic acid that has not been contacted by a polypeptide described in compositions, systems, and methods described herein. For example, indel activity may be detected by next generation sequencing of one or more target loci of a target nucleic acid where indel percentage is calculated as the fraction of sequencing reads containing insertions or deletions relative to an unedited reference sequence. In some embodiments, methods, systems, and compositions comprising an effector protein and guide nucleic acid described herein may exhibit about 0.0001% to about 65% or more indel activity upon contact to a target nucleic acid compared to a target nucleic acid non-contacted with compositions, systems, or by methods described herein. For example, methods, systems, and compositions comprising an effector protein and guide nucleic acid described herein may exhibit about 0.0001%, about 0.001%, about 0.01%, about 0.1%, about 1%, about 5%, about 10%, about 15%, about 20%, about 25%, about 30%, about 35%, about 40%, about 45%, about 50%, about 55%, about 60%, about 65% or more indel activity.

[0440] In some embodiments, editing or modifications of a target nucleic acid as described herein effects one or more mutations comprising splicing disruption mutations, frameshift mutations (e.g., 1+ or 2+frameshift mutation), sequence deletion, sequence skipping, sequence reframing, sequence knock-in, or any combination thereof.

[0441] A splicing disruption may be a modification that disrupts the splicing of a target nucleic acid or splicing of a sequence that is transcribed from a target nucleic acid relative to a target nucleic acid without the splicing disruption.

[0442] A frameshift mutation may be a modification that alters the reading frame of a target nucleic acid relative to a target nucleic acid without the frameshift mutation. In some embodiments, a frameshift mutation may be a +2 frameshift mutation wherein a reading frame is modified by 2 bases. In some embodiments, a frameshift mutation may be a +1 frameshift mutation wherein a reading frame is modified by 1 base. In some embodiments, a frameshift mutation is a modification that alters the number of bases in a target nucleic acid so that it is not divisible by three. In some embodiments, a frameshift mutation may be a modification that is not a splicing disruption.

[0443] A sequence as described in reference to a sequence deletion, sequence skipping, sequence reframing, and sequence knock-in may be a DNA sequence, a RNA sequence, a modified DNA or RNA sequence, a mutated sequence, a wild-type sequence, a coding sequence, a non-coding sequence, an exonic sequence (exon), an intronic sequence (intron), or any combination thereof. Such a sequence may be a sequence that is associated with a disease as described herein, such as DMD.

[0444] In some embodiments, sequence deletion is a modification where one or more sequences in a target nucleic acid are deleted relative to a target nucleic acid without the sequence deletion. In some embodiments, a sequence deletion may result in or effect a splicing disruption or a frameshift mutation. In some embodiments, a sequence deletion result in or effect a splicing disruption.

[0445] In some embodiments, sequence skipping is a modification where one or more sequences in a target nucleic acid are skipped upon transcription or translation of the target nucleic acid relative to a target nucleic acid without the sequence skipping. In some embodiments, sequence skipping may result in or effect a splicing disruption or a frameshift mutation. In some embodiments, sequence skipping may result in or effect a splicing disruption.

[0446] In some embodiments, sequence reframing is a modification where one or more bases in a target are modified so that the reading frame of the sequence is reframed relative to a target nucleic acid without the sequence reframing. In some embodiments, sequence reframing may result in or effect a splicing disruption or a frameshift mutation. In some embodiments, sequence reframing may result in or effect a frameshift mutation.

[0447] In some embodiments, sequence knock-in is a modification where one or more sequences is inserted into a target nucleic acid relative to a target nucleic acid without the sequence knock-in. In some embodiments, sequence knock-in may result in or effect a splicing disruption or a frameshift mutation. In some embodiments, sequence knock-in may result in or effect a splicing disruption.

[0448] In some embodiments, editing or modification of a target nucleic acid may be locus specific, wherein compositions, systems, and methods described herein may edit or modify a target nucleic acid at one or more specific loci to effect one or more specific mutations comprising splicing disruption mutations, frameshift mutations, sequence deletion, sequence skipping, sequence reframing, sequence knock-in, or any combination thereof. For example, editing or modification of a specific locus may effect any one of a splicing disruption, frameshift (e.g., 1+ or 2+frameshift), sequence deletion, sequence skipping, sequence reframing, sequence knock-in, or any combination thereof. In some embodiments, editing or modification of a target nucleic acid may be locus specific, modification specific, or both. In some embodiments, editing or modification of a target nucleic acid may be locus specific, modification specific, or both, wherein compositions, systems, and methods described herein comprise an effector protein described herein and a guide nucleic acid described herein.

[0449] Methods of editing a target nucleic acid or modulating the expression of a target nucleic acid may be performed in vivo. Methods of editing a target nucleic acid or modulating the expression of a target nucleic acid may be performed in vitro. For example, a plasmid may be modified in vitro using a composition described herein and introduced into a cell or organism. Methods of editing a target nucleic acid or modulating the expression of a target nucleic acid may be performed ex vivo. For example, methods may comprise obtaining a cell from a subject, modifying a target nucleic acid in the cell with methods described herein, and returning the cell to the subject.

[0450] Also described herein is a method of modifying a target nucleic acid within a human gene, or associated with expression of a human gene, the method comprising contacting the target nucleic acid with any one of the compositions described herein, any one of the nucleic acid expression vectors or libraries described herein, any one of the pharmaceutical compositions described herein, or any one of the systems described herein, thereby modifying the target nucleic acid.

[0451] In some embodiments, the method of modifying a target nucleic acid comprises insertion or deletion of an exon, intron, exon fragment, intron fragment, gene regulatory region, gene regulatory region fragment, or any combinations thereof. In some embodiments, the modifying of the target nucleic acid comprises insertion of an exon, intron, exon fragment, intron fragment, gene regulatory region, gene regulatory region fragment, or combinations thereof. In some embodiments, the method of modifying further comprising contacting the target nucleic acid with a guide nucleic acid. In some embodiments, the method of modifying is performed in a cell. In some embodiments, the method of modifying is performed in vivo. In some embodiments, the method of modifying as described herein, wherein the target nucleic acid comprises a mutation associated with a disease, and optionally wherein the disease is any one of the diseases recited in TABLE 5 and/or wherein the target nucleic acid is encoded by a gene recited in TABLE 4. In some embodiments, the disease is a genetic disorder. In some embodiments, the genetic disorder is a neurological disorder. In some embodiments, the target nucleic acid is encoded by a gene recited in TABLE 4. In some embodiments, the gene comprises one or more mutations. In some embodiments, the one or more mutations comprise a point mutation, a single nucleotide polymorphism (SNP), a chromosomal mutation, a copy number mutation, or any combination thereof. In some embodiments, the disease is any one of the diseases recited in TABLE 5.

[0452] In some embodiments, the modification of the target nucleic acid comprises insertion of a donor nucleic acid, deletion of a target nucleic acid, insertion of a donor nucleic acid fragment, deletion of a target nucleic acid fragment, or combinations thereof. In some embodiments, the modification of the target nucleic acid comprises insertion of a donor nucleic acid or donor nucleic acid fragment into the target nucleic acid. In some embodiments, the modification of the target nucleic acid comprises deletion of a target nucleic acid or a target nucleic acid fragment from the target nucleic acid.

[0453] Donor Nucleic Acids

[0454] In some embodiments, a donor nucleic acid comprises a nucleic acid that is incorporated into a target nucleic acid or target sequence. In some embodiments, a donor nucleic acid may be incorporated into an insertion site in a target nucleic acid. Exemplary insertion sites are described herein. In some embodiments, a donor nucleic acid comprises a structural motif that is recognized by polypeptides and/or partner polypeptides described herein. In some embodiments, the structural motif is an intermolecular recombination motif. In some embodiments, the structural motif is one or more inverted repeats, inverted terminal repeats, or combinations thereof.

[0455] In reference to a viral vector, the term donor nucleic acid refers to a sequence of nucleotides that will be or has been introduced into a cell following transfection of the viral vector. The donor nucleic acid may be introduced into the cell by any mechanism of the transfecting viral vector, including, but not limited to, integration into the genome of the cell or introduction of an episomal plasmid or viral genome. As another example, when used in reference to the activity of an effector protein, the term donor nucleic acid refers to a sequence of nucleotides that will be or has been inserted at the site of cleavage by the effector protein (cleaving (hydrolysis of a phosphodiester bond) of a nucleic acid resulting in a nick or double strand break—nuclease activity). As yet another example, when used in reference to homologous recombination, the term donor nucleic acid refers to a sequence of DNA that serves as a template in the process of homologous recombination, which may carry the modification that is to be or has been introduced into the target nucleic acid. By using this donor nucleic acid as a template, the genetic information, including the modification, is copied into the target nucleic acid by way of homologous recombination.

[0456] Donor nucleic acids of any suitable size may be integrated into a target nucleic acid or genome. In some embodiments, the donor polynucleotide integrated into a genome is less than 3, about 3, 3.5, 4, 4.5, 5, 5.5, 6, 6.5, 7, 7.5, 8, 8.5, 9, 9.5, 10, 10.5, 11, 11.5, 12, 12.5, 13, 13.5, 14, 14.5, 15, 16, 17, 18, 19, 20, 25, 30, 35, 40, 45, 50, 100, 150, 200, 250, 300, 350, 400, 450, 500 kilobases in length. In some embodiments, donor nucleic acids are more than 500 kilobases (kb) in length.

[0457] The donor nucleic acid may comprise a sequence that is derived from a plant, bacteria, virus or an animal. The animal may be human. The animal may be a non-human animal, such as, by way of non-limiting example, a mouse, rat, hamster, rabbit, pig, bovine, deer, sheep, goat, chicken, cat, dog, ferret, a bird, non-human primate (e.g., marmoset, rhesus monkey). The non-human animal may be a domesticated mammal or an agricultural mammal.

[0458] Also described herein is a composition comprising an effector protein and an effector partner combination as described in TABLE 6. In some embodiments, the composition comprises the nucleic acid that is a donor nucleic acid. In some embodiments, the donor nucleic acid is linear double-stranded DNA or not linear double-stranded DNA. In some embodiments, the donor nucleic acid comprises a structural motif that is recognized by the polypeptide. In some embodiments, the structural motif is an intermolecular recombination motif, and optionally wherein the structural motif is one or more inverted repeats, inverted terminal repeats, or combinations thereof.

[0459] Genetically Modified Cells and Organisms

[0460] Methods of editing described herein may be employed to generate a genetically modified cell. The cell may be a eukaryotic cell (e.g., a mammalian cell) or a prokaryotic cell (e.g., an archaeal cell). The cell may be derived from a multicellular organism and cultured as a unicellular entity. The cell may comprise a heritable genetic modification, such that progeny cells derived therefrom comprise the heritable genetic mutation. The cell may be progeny of a genetically modified cell comprising a genetic modification of the genetically modified parent cell. A genetically modified cell may comprise a deletion, insertion, mutation, or non-native sequence relative to a wild-type version of the cell or the organism from which the cell was derived.

[0461] Methods may comprise contacting a cell with a nucleic acid (e.g., a plasmid or mRNA) comprising a nucleotide sequence encoding an effector protein, wherein the effector protein comprises an amino acid sequence that is at least 65%, at least 70%, at least 75%, at least 80%, at least 85%, at least 90%, at least 95%, at least 97%, at least 98%, or at least 99% identical to any one of the sequences of TABLE 1.

[0462] Methods may comprise contacting a cell with a nucleic acid (e.g., a plasmid or mRNA) comprising a nucleotide sequence encoding an effector partner, wherein the effector partner comprises an amino acid sequence that is at least 65%, at least 70%, at least 75%, at least 80%, at least 85%, at least 90%, at least 95%, at least 97%, at least 98%, or at least 99% identical to any one of the sequences of TABLE 1.1.

[0463] Methods may comprise contacting cells with a nucleic acid (e.g., a plasmid or RNA) comprising a a guide nucleic acid described herein or a nucleotide sequence, when transcribed, produces a guide nucleic acid described herein. Contacting may comprise electroporation, acoustic poration, optoporation, viral vector-based delivery, iTOP, nanoparticle delivery (e.g., lipid or gold nanoparticle delivery), cell-penetrating peptide (CPP) delivery, DNA nanostructure delivery, or any combination thereof.

[0464] Methods may comprise contacting a cell with one or more of an effector protein, an effector partner, or a multimeric complex thereof, wherein each effector protein comprises an amino acid sequence that is at least 65%, at least 70%, at least 75%, at least 80%, at least 85%, at least 90%, at least 95%, at least 97%, at least 98%, or at least 99% identical to any one of the sequences of TABLE 1, and wherein each effector partner comprises an amino acid sequence that is at least 65%, at least 70%, at least 75%, at least 80%, at least 85%, at least 90%, at least 95%, at least 97%, at least 98%, or at least 99% identical to any one of the sequences of TABLE 1.1.

[0465] Methods may comprise contacting a cell with an effector protein, or a nucleic acid (e.g., a plasmid or mRNA) encoding the effector protein, an effector partner, or a nucleic acid (e.g., a plasmid or mRNA) encoding the effector partner, and a guide nucleic acid or a nucleic acid (e.g., a plasmid or RNA) comprising a nucleotide sequence that encodes a guide nucleic acid described herein, wherein the effector protein comprises an amino acid sequence that is at least 65%, at least 70%, at least 75%, at least 80%, at least 85%, at least 90%, at least 95%, at least 97%, at least 98%, or at least 99% identical to any one of the sequences of TABLE 1, and the effector partner comprises an amino acid sequence that is at least 65%, at least 70%, at least 75%, at least 80%, at least 85%, at least 90%, at least 95%, at least 97%, at least 98%, or at least 99% identical to any one of the sequences of TABLE 1.1. Such methods include contacting a cell with an RNP complex as described herein.

[0466] Methods of the disclosure may be performed in a subject. Compositions of the disclosure may be administered to a subject. A subject may be a human. A subject may be a mammal (e.g., rat, mouse, cow, dog, pig, sheep, horse). A subject may be a vertebrate or an invertebrate. A subject may be a laboratory animal. A subject may be a patient. A subject may be at risk of developing, suffering from, or displaying symptoms a disease or disorder as set forth in herein. The subject may have a mutation associated with a gene described herein. The subject may display symptoms associated with a mutation of a gene described herein. In some embodiments, a mutation comprises a point mutation or single nucleotide polymorphism (SNP), a chromosomal mutation, a copy number mutation, or any combination thereof. A point mutation optionally comprises a substitution, insertion, or deletion. In some embodiments, a mutation comprises a chromosomal mutation. A chromosomal mutation may comprise an inversion, a deletion, a duplication, or a translocation. In some embodiments, a mutation comprises a copy number variation. A copy number variation may comprise a gene amplification or an expanding trinucleotide repeat. In some embodiments, mutations may be as described herein.

[0467] Methods of the disclosure may be performed in a cell. A cell may be in vitro. A cell may be in vivo. A cell may be ex vivo. A cell may be an isolated cell. A cell may be a cell inside of an organism. A cell may be an organism. A cell may be a cell in a cell culture. A cell may be one of a collection of cells. A cell may be a mammalian cell or derived from a mammalian cell. A cell may be a rodent cell or derived from a rodent cell. A cell may be a human cell or derived from a human cell. A cell may be a eukaryotic cell or derived from a eukaryotic cell. A cell may be a pluripotent stem cell. A cell may be a plant cell or derived from a plant cell. A cell may be an animal cell or derived from an animal cell. A cell may be an invertebrate cell or derived from an invertebrate cell. A cell may be a vertebrate cell or derived from a vertebrate cell.

[0468] A cell may be from a specific organ or tissue. The tissue may be muscle. The muscle may be skeletal muscle. In some embodiments, skeletal muscles include the following: abductor digiti minimi (foot), abductor digiti minimi (hand), abductor hallucis, abductor pollicis brevis, abductor pollicis longus, adductor brevis, adductor hallucis, adductor longus, adductor magnus, adductor pollicis, anconeus, articularis cubiti, articularis genu, aryepiglotticus, auricularis, biceps brachii, biceps femoris, brachialis, brachioradialis, buccinator, bulbospongiosus, constrictor of pharynx-inferior, constrictor of pharynx-middle, constrictor of pharynx-superior, coracobrachialis, corrugator supercilii, cremaster, cricothyroid, dartos, deep transverse perinei, deltoid, depressor anguli oris, depressor labii inferioris, diaphragm, digastric, digastric (anterior view), erector spinae—spinalis, erector spinae—iliocostalis, erector spinae—longissimus, extensor carpi radialis brevis, extensor carpi radialis longus, extensor carpi ulnaris, extensor digiti minimi (hand), extensor digitorum (hand), extensor digitorum brevis (foot), extensor digitorum longus (foot), extensor hallucis brevis, extensor hallucis longus, extensor indicis, extensor pollicis brevis, extensor pollicis longus, external oblique abdominis, flexor carpi radialis, flexor carpi ulnaris, flexor digiti minimi brevis (foot), flexor digiti minimi brevis (hand), flexor digitorum brevis, flexor digitorum longus (foot), flexor digitorum profundus, flexor digitorum superficialis, flexor hallucis brevis, flexor hallucis longus, flexor pollicis brevis, flexor pollicis longus, frontalis, gastrocnemius, gemellus inferior, gemellus superior, genioglossus, geniohyoid, gluteus maximus, gluteus medius, gluteus minimus, gracilis, hyoglossus, iliacus, inferior oblique, inferior rectus, infraspinatus, intercostals external, intercostals innermost, intercostals internal, internal oblique abdominis, interossei—dorsal of hand, interossei-dorsal of foot, interossei-palmar of hand, interossei—plantar of foot, interspinales, intertransversarii, intrinsic muscles of tongue, ishiocavernosus, lateral cricoarytenoid, lateral pterygoid, lateral rectus, latissimus dorsi, levator anguli oris, levator ani-coccygeus, levator ani—iliococcygeus, levator ani-pubococcygeus, levator ani-puborectalis, levator ani-pubovaginalis, levator labii superioris, levator labii superioris, alaeque nasi, levator palpebrae superioris, levator scapulae, levator veli palatini, levatores costarum, longus capitis, longus colli, lumbricals of foot, lumbricals of hand, masseter, medial pterygoid, medial rectus, mentalis, m. uvulae, mylohyoid, nasalis, oblique arytenoid, obliquus capitis inferior, obliquus capitis superior, obturator externus, obturator internus (A), obturator internus (B), omohyoid, opponens digiti minimi (hand), opponens pollicis, orbicularis oculi, orbicularis oris, palatoglossus, palatopharyngeus, palmaris brevis, palmaris longus, pectineus, pectoralis major, pectoralis minor, peroneus brevis, peroneus longus, peroneus tertius, piriformis (A), piriformis (B), plantaris, platysma, popliteus, posterior cricoarytenoid, procerus, pronator quadratus, pronator teres, psoas major, psoas minor, pyramidalis, quadratus femoris, quadratus lumborum, quadratus plantae, rectus abdominis, rectus capitus anterior, rectus capitus lateralis, rectus capitus posterior major, rectus capitus posterior minor, rectus femoris, rhomboid major, rhomboid minor, risorius, salpingopharyngeus, sartorius, scalenus anterior, scalenus medius, scalenus minimus, scalenus posterior, semimembranosus, semitendinosus, serratus anterior, serratus posterior inferior, serratus posterior superior, soleus, sphincter ani, sphincter urethrae, splenius capitis, splenius cervicis, stapedius, sternocleidomastoid, sternohyoid, sternothyroid, styloglossus, stylohyoid, stylohyoid (anterior view), stylopharyngeus, subclavius, subcostalis, subscapularis, superficial transverse perinei, superior oblique, superior rectus, supinator, supraspinatus, temporalis, temporoparietalis, tensor fasciae lata, tensor tympani, tensor veli palatini, teres major, teres minor, thyro-arytenoid & vocalis, thyro-epiglotticus, thyrohyoid, tibialis anterior, tibialis posterior, transverse arytenoid, transversospinalis-multifidus, transversospinalis-rotatores, transversospinalis-semispinalis, transversus abdominis, transversus thoracis, trapezius, triceps, vastus intermedius, vastus lateralis, vastus medialis, zygomaticus major, or zygomaticus minor. In some embodiments, the cell is a myocyte. In some embodiments, the cell is a muscle cell. In some embodiments, the muscle cell is a skeletal muscle cell. In some embodiments, the skeletal muscle cell is a red (slow) skeletal muscle cell, a white (fast) skeletal muscle cell or an intermediate skeletal muscle cell.

[0469] The tissue may be the subject's blood, bone marrow, or cord blood. The tissue may be heterologous donor blood, cord blood, or bone marrow. The tissue may be allogenic blood, cord blood, or bone marrow. In some embodiments, the cell is a: a stem cell, muscle satellite cell, muscle stem cell, myoblast, muscle progenitor cell, a pluripotent stem cell or a cell derived from a pluripotent stem cell.

### XIII. METHODS OF DETECTING A TARGET NUCLEIC ACID

[0470] Provided herein are methods of detecting target nucleic acids. Methods may comprise detecting target nucleic acids with compositions or systems described herein. Methods may comprise detecting a target nucleic acid in a sample, e.g., a cell lysate, a biological fluid, or environmental sample. Methods may comprise detecting a target nucleic acid in a cell. In some embodiments, methods of detecting a target nucleic acid in a sample or cell comprises contacting the sample or cell with an effector protein or a multimeric complex thereof, a guide nucleic acid, wherein at least a portion of the guide nucleic acid is complementary to at least a portion of the target nucleic acid, and a reporter nucleic acid that is cleaved in the presence of the effector protein, the guide nucleic acid, and the target nucleic acid, and detecting a signal produced by cleavage of the reporter nucleic acid, thereby detecting the target nucleic acid in the sample. In some embodiments, methods result in trans cleavage of the reporter nucleic acid. In some embodiments, methods result in cis cleavage of the reporter nucleic acid.

[0471] In some embodiments, methods of detecting comprise contacting a target nucleic acid, a cell comprising the target nucleic acid, or a sample comprising a target nucleic acid with an effector protein that comprises an amino acid sequence that is at least is at least 65%, at least 70%, at least 75%, at least 80%, at least 85%, at least 90%, at least 92%, at least 95%, at least 97%, at least 98%, at least 99%, or 100% identical to any one of the sequences of TABLE 1.

[0472] Methods may comprise contacting the sample to a complex comprising a guide nucleic acid comprising a segment that is reverse complementary to a segment of the target nucleic acid and an effector protein that exhibits sequence independent cleavage upon forming a complex comprising the segment of the guide nucleic acid binding to the segment of the target nucleic acid; and assaying for a signal indicating cleavage of at least some protein-nucleic acids of a population of protein-nucleic acids, wherein the signal indicates a presence of the target nucleic acid in the sample and wherein absence of the signal indicates an absence of the target nucleic acid in the sample.

[0473] Methods may comprise contacting the sample comprising the target nucleic acid with a guide nucleic acid targeting a target nucleic acid segment, an effector protein capable of being activated when complexed with the guide nucleic acid and the target nucleic acid segment, a single stranded nucleic acid of a reporter comprising a detection moiety, wherein the nucleic acid of a reporter is capable of being cleaved by the activated effector protein, thereby generating a first detectable signal, cleaving the single stranded nucleic acid of a reporter using the effector protein that cleaves as measured by a change in color, and measuring the first detectable signal on the support medium.

[0474] Methods may comprise contacting the sample or cell with an effector protein or a multimeric complex thereof and a guide nucleic acid at a temperature of at least about 25° C., at least about 30° C., at least about 35° C., at least about 40° C., at least about 50° C., or at least about 65° C. In some embodiments, the temperature is not greater than 80° C. In some embodiments, the temperature is about 25° C., about 30° C., about 35° C., about 40° C., about 45° C., about 50° C., about 55° C., about 60° C., about 65° C., or about 70° C. In some embodiments, the temperature is about 25° C. to about 45° C., about 35° C. to about 55° C., or about 55° C. to about 65° C.

[0475] Methods may comprise cleaving a strand of a single-stranded target nucleic acid with an effector protein or a multimeric complex thereof, as assessed with an in vitro cis-cleavage assay. A cleavage assay may comprise an assay designed to visualize, quantitate or identify cleavage of a nucleic acid. In some embodiments, the cleavage activity may be cis-cleavage activity. In some embodiments, the cleavage activity may be trans-cleavage activity. An example of such an assay (an in vitro cis-cleavage assay). An example of such an assay may follow a procedure comprising: (i) providing equimolar amounts of an effector protein comprising at least 70% sequence identity to any one of the sequences set forth in TABLE 1, optionally an effector partner comprising at least 70% sequence identity to any one of the sequences set forth in TABLE 1.1, and a guide nucleic acid, under conditions to form a ribonucleoprotein complex; (ii) adding linear dsDNA comprising a nucleic acid sequence targeted by the guide nucleic acid and adjacent to a PAM (iii) incubating the mixture under conditions to enable cleavage of the plasmid; (iv) quenching the reaction with EDTA and a protease; and (v) analyzing the reaction products (e.g., viewing the cleaved and uncleaved linear dsDNA with gel electrophoresis).

[0476] In some embodiments, there is a threshold of detection for methods of detecting target nucleic acids. In some embodiments, methods are not capable of detecting target nucleic acids that are present in a sample or solution at a concentration less than or equal to 10 nM. The term “threshold of detection” is used herein to describe the minimal amount of target nucleic acid that must be present in a sample in order for detection to occur. For example, when a threshold of detection is 10 nM, then a signal may be detected when a target nucleic acid is present in the sample at a concentration of 10 nM or more. In some embodiments, the threshold of detection is less than or equal to 5 nM, 1 nM, 0.5 nM, 0.1 nM, 0.05 nM, 0.01 nM, 0.005 nM, 0.001 nM, 0.0005 nM, 0.0001 nM, 0.00005 nM, 0.00001 nM, 10 pM, 1 pM, 500 fM, 250 fM, 100 fM, 50 fM, 10 fM, 5 fM, 1 fM, 500 attomole (aM), 100 aM, 50 aM, 10 aM, or 1 aM. In some embodiments, the threshold of detection is in a range of from 1 aM to 1 nM, 1 aM to 500 pM, 1 aM to 200 pM, 1 aM to 100 pM, 1 aM to 10 pM, 1 aM to 1 pM, 1 aM to 500 fM, 1 aM to 100 fM, 1 aM to 1 fM, 1 aM to 500 aM, 1 aM to 100 aM, 1 aM to 50 aM, 1 aM to 10 aM, 10 aM to 1 nM, 10 aM to 500 pM, 10 aM to 200 pM, 10 aM to 100 pM, 10 aM to 10 pM, 10 aM to 1 pM, 10 aM to 500 fM, 10 aM to 100 fM, 10 aM to 1 fM, 10 aM to 500 aM, 10 aM to 100 aM, 10 aM to 50 aM, 100 aM to 1 nM, 100 aM to 500 pM, 100 pM to 200 pM, 100 aM to 100 pM, 100 aM to 10 pM, 100 aM to 1 pM, 100 aM to 500 fM, 100 aM to 100 fM, 100 aM to 1 fM, 100 aM to 500 aM, 500 aM to 1 nM, 500 aM to 500 pM, 500 aM to 200 pM, 500 aM to 100 pM, 500 aM to 10 pM, 500 aM to 1 pM, 500 aM to 500 fM, 500 aM to 100 fM, 500 aM to 1 fM, 1 fM to 1 nM, 1 fM to 500 pM, 1 fM to 200 pM, 1 fM to 100 pM, 1 fM to 10 pM, 1 fM to 1 pM, 10 fM to 1 nM, 10 fM to 500 pM, 10 fM to 200 pM, 10 fM to 100 pM, 10 fM to 10 pM, 10 fM to 1 pM, 500 fM to 1 nM, 500 fM to 500 pM, 500 fM to 200 pM, 500 fM to 100 pM, 500 fM to 10 pM, 500 fM to 1 pM, 800 fM to 1 nM, 800 fM to 500 pM, 800 fM to 200 pM, 800 fM to 100 pM, 800 fM to 10 pM, 800 fM to 1 pM, 1 pM to 1 nM, 1 pM to 500 pM, 1 pM to 200 pM, 1 pM to 100 pM, or 1 pM to 10 pM. In some embodiments, the threshold of detection in a range of from 800 fM to 100 pM, 1 pM to 10 pM, 10 fM to 500 fM, 10 fM to 50 fM, 50 fM to 100 fM, 100 fM to 250 fM, or 250 fM to 500 fM. In some embodiments, the threshold of detection is in a range of from 2 aM to 100 pM, from 20 aM to 50 pM, from 50 aM to 20 pM, from 200 aM to 5 pM, or from 500 aM to 2 pM. In some embodiments, the minimum concentration at which a target nucleic acid is detected in a sample is in a range of from 1 aM to 1 nM, 10 aM to 1 nM, 100 aM to 1 nM, 500 aM to 1 nM, 1 fM to 1 nM, 1 fM to 500 pM, 1 fM to 200 pM, 1 fM to 100 pM, 1 fM to 10 pM, 1 fM to 1 pM, 10 fM to 1 nM, 10 fM to 500 pM, 10 fM to 200 pM, 10 fM to 100 pM, 10 fM to 10 pM, 10 fM to 1 pM, 500 fM to 1 nM, 500 fM to 500 pM, 500 fM to 200 pM, 500 fM to 100 pM, 500 fM to 10 pM, 500 fM to 1 pM, 800 fM to 1 nM, 800 fM to 500 pM, 800 fM to 200 pM, 800 fM to 100 pM, 800 fM to 10 pM, 800 fM to 1 pM, 1 pM to 1 nM, 1 pM to 500 pM, from 1 pM to 200 pM, 1 pM to 100 pM, or 1 pM to 10 pM. In some embodiments, the minimum concentration at which a target nucleic acid is detected in a sample is in a range of from 2 aM to 100 pM, from 20 aM to 50 pM, from 50 aM to 20 pM, from 200 aM to 5 pM, or from 500 aM to 2 pM. In some embodiments, the minimum concentration at which a single stranded target nucleic acid may be detected in a sample is in a range of from 1 aM to 100 pM. In some embodiments, the minimum concentration at which a target nucleic acid may be detected in a sample is in a range of from 1 fM to 100 pM. In some embodiments, the minimum concentration at which a single stranded target nucleic acid may be detected in a sample is in a range of from 10 fM to 100 pM. In some embodiments, the minimum concentration at which a single stranded target nucleic acid may be detected in a sample is in a range of from 800 fM to 100 pM. In some embodiments, the minimum concentration at which a single stranded target nucleic acid may be detected in a sample is in a range of from 1 pM to 10 pM. In some embodiments, the devices, systems, fluidic devices, kits, and methods described herein detect a target single-stranded nucleic acid in a sample comprising a plurality of nucleic acids such as a plurality of non-target nucleic acids, where the target single-stranded nucleic acid is present at a concentration as low as 1 aM, 10 aM, 100 aM, 500 aM, 1 fM, 10 fM, 500 fM, 800 fM, 1 pM, 10 pM, 100 pM, or 1 pM.

[0477] In some embodiments, the target nucleic acid is present in a cleavage reaction at a concentration of about 10 nM, about 20 nM, about 30 nM, about 40 nM, about 50 nM, about 60 nM, about 70 nM, about 80 nM, about 90 nM, about 100 nM, about 200 nM, about 300 nM, about 400 nM, about 500 nM, about 600 nM, about 700 nM, about 800 nM, about 900 nM, about 1 μM, about 10 μM, or about 100 μM. In some embodiments, the target nucleic acid is present in the cleavage reaction at a concentration of from 10 nM to 20 nM, from 20 nM to 30 nM, from 30 nM to 40 nM, from 40 nM to 50 nM, from 50 nM to 60 nM, from 60 nM to 70 nM, from 70 nM to 80 nM, from 80 nM to 90 nM, from 90 nM to 100 nM, from 100 nM to 200 nM, from 200 nM to 300 nM, from 300 nM to 400 nM, from 400 nM to 500 nM, from 500 nM to 600 nM, from 600 nM to 700 nM, from 700 nM to 800 nM, from 800 nM to 900 nM, from 900 nM to 1 μM, from 1 μM to 10 μM, from 10 μM to 100 μM, from 10 nM to 100 nM, from 10 nM to 1 μM, from 10 nM to 10 μM, from 10 nM to 100 μM, from 100 nM to 1 μM, from 100 nM to 10 μM, from 100 nM to 100 μM, or from 1 μM to 100 μM. In some embodiments, the target nucleic acid is present in the cleavage reaction at a concentration of from 20 nM to 50 μM, from 50 nM to 20 μM, or from 200 nM to 5 μM.

[0478] In some embodiments, methods detect a target nucleic acid in less than 60 minutes. In some embodiments, methods detect a target nucleic acid in less than about 120 minutes, less than about 110 minutes, less than about 100 minutes, less than about 90 minutes, less than about 80 minutes, less than about 70 minutes, less than about 60 minutes, less than about 55 minutes, less than about 50 minutes, less than about 45 minutes, less than about 40 minutes, less than about 35 minutes, less than about 30 minutes, less than about 25 minutes, less than about 20 minutes, less than about 15 minutes, less than about 10 minutes, less than about 5 minutes, less than about 4 minutes, less than about 3 minutes, less than about 2 minutes, or less than about 1 minute.

[0479] In some embodiments, methods require at least about 120 minutes, at least about 110 minutes, at least about 100 minutes, at least about 90 minutes, at least about 80 minutes, at least about 70 minutes, at least about 60 minutes, at least about 55 minutes, at least about 50 minutes, at least about 45 minutes, at least about 40 minutes, at least about 35 minutes, at least about 30 minutes, at least about 25 minutes, at least about 20 minutes, at least about 15 minutes, at least about 10 minutes, or at least about 5 minutes to detect a target nucleic acid. In some embodiments, the sample is contacted with the reagents for from 5 minutes to 120 minutes, from 5 minutes to 100 minutes, from 10 minutes to 90 minutes, from 15 minutes to 45 minutes, or from 20 minutes to 35 minutes.

[0480] In some embodiments, methods of detecting are performed in less than 10 hours, less than 9 hours, less than 8 hours, less than 7 hours, less than 6 hours, less than 5 hours, less than 4 hours, less than 3 hours, less than 2 hours, less than 1 hour, less than 50 minutes, less than 45 minutes, less than 40 minutes, less than 35 minutes, less than 30 minutes, less than 25 minutes, less than 20 minutes, less than 15 minutes, less than 10 minutes, less than 9 minutes, less than 8 minutes, less than 7 minutes, less than 6 minutes, or less than 5 minutes. In some embodiments, methods of detecting are performed in about 5 minutes to about 10 hours, about 10 minutes to about 8 hours, about 15 minutes to about 6 hours, about 20 minutes to about 5 hours, about 30 minutes to about 2 hours, or about 45 minutes to about 1 hour.

[0481] Methods may comprise detecting a detectable signal within 5 minutes of contacting the sample and/or the target nucleic acid with the guide nucleic acid and/or the effector protein. In some embodiments, detecting occurs within 1, 2, 3, 4, 5, 6, 7, 8, 9, 10, 11, 12, 13, 14, 15, 20, 25, 30, 35, 40, 45, 50, 55, 60, 70, 80, 90, 100, 110, or 120 minutes of contacting the target nucleic acid. In some embodiments, detecting occurs within 1 to 120, 5 to 100, 10 to 90, 15 to 80, 20 to 60, or 30 to 45 minutes of contacting the target nucleic acid.

[0482] Amplification

[0483] Methods of detecting may comprise amplifying a target nucleic acid for detection using any of the compositions or systems described herein. Amplifying may comprise changing the temperature of the amplification reaction, also known as thermal amplification (e.g., PCR). Amplifying may be performed at essentially one temperature, also known as isothermal amplification. Amplifying may improve at least one of sensitivity, specificity, or accuracy of the detection of the target nucleic acid.

[0484] Amplifying may comprise subjecting a target nucleic acid to an amplification reaction selected from transcription mediated amplification (TMA), helicase dependent amplification (HDA), or circular helicase dependent amplification (cHDA), strand displacement amplification (SDA), recombinase polymerase amplification (RPA), loop mediated amplification (LAMP), exponential amplification reaction (EXPAR), rolling circle amplification (RCA), ligase chain reaction (LCR), simple method amplifying RNA targets (SMART), single primer isothermal amplification (SPIA), multiple displacement amplification (MDA), nucleic acid sequence based amplification (NASBA), hinge-initiated primer-dependent amplification of nucleic acids (HIP), nicking enzyme amplification reaction (NEAR), and improved multiple displacement amplification (IMDA).

[0485] In some embodiments, amplification of the target nucleic acid comprises modifying the sequence of the target nucleic acid. For example, amplification may be used to insert a PAM sequence into a target nucleic acid that lacks a PAM sequence. In some embodiments, amplification may be used to increase the homogeneity of a target nucleic acid in a sample. For example, amplification may be used to remove a nucleic acid variation that is not of interest in the target nucleic acid.

[0486] Amplifying may take 1, 2, 3, 4, 5, 6, 7, 8, 9, 10, 11, 12, 13, 14, 15, 16, 17, 18, 19, 20, 25, 30, 40, 50, or 60 minutes. Amplifying may be performed at a temperature of around 20-45° C. Amplifying may be performed at a temperature of less than about 20° C., less than about 25° C., less than about 30° C., 35° C., less than about 37° C., less than about 40° C., or less than about 45° C. The nucleic acid amplification reaction may be performed at a temperature of at least about 20° C., at least about 25° C., at least about 30° C., at least about 35° C., at least about 37° C., at least about 40° C., or at least about 45° C.

### XIV. METHODS OF TREATING A DISORDER

[0487] Described herein are compositions, systems and methods for treating a disease in a subject by modifying a target nucleic acid associated with a gene or expression of a gene related to the disease. In some embodiments, methods comprise administering a composition or cell described herein to a subject. By way of non-limiting example, the disease may be a cancer, an ophthalmological disorder, a neurological disorder, a neurodegenerative disease, a blood disorder, or a metabolic disorder, or a combination thereof. The disease may be an inherited disorder, also referred to as a genetic disorder. The disease may be the result of an infection or associated with an infection.

[0488] The compositions, systems and methods described herein may be used to treat, prevent, or inhibit a disease or syndrome in a subject. In some embodiments, the disease is a liver disease, a lung disease, an eye disease, or a muscle disease. Exemplary diseases and syndromes include, but are not limited to the diseases and syndromes listed in TABLE 5. In some embodiments, the disease is a genetic disorder. In some embodiments, the genetic disorder is a neurological disorder. In some embodiments, gene is a human gene. In some embodiments, the human gene is a gene recited in TABLE 4.

[0489] In some embodiments, compositions, systems and methods modify at least one gene associated with the disease or the expression thereof. In some embodiments, the disease is Alzheimer's disease and the gene is selected from APP, BACE-1, PSD95, MAPT, PSEN1, PSEN2, and APOEc4. In some embodiments, the disease is Parkinson's disease and the gene is selected from SNCA, GDNF, and LRRK2. In some embodiments, the disease comprises Centronuclear myopathy and the gene is DNM2. In some embodiments, the disease is Huntington's disease and the gene is HTT. In some embodiments, the disease is Alpha-1 antitrypsin deficiency (AATD) and the gene is SERPINAl. In some embodiments, the disease is amyotrophic lateral sclerosis (ALS) and the gene is selected from SOD1, FUS, C9ORF72, ATXN2, TARDBP, and CHCHD10. In some embodiments, the disease comprises Alexander Disease and the gene is GFAP. In some embodiments, the disease comprises anaplastic large cell lymphoma and the gene is CD30. In some embodiments, the disease comprises Angelman Syndrome and the gene is UBE3A. In some embodiments, the disease comprises calcific aortic stenosis and the gene is Apo(a). In some embodiments, the disease comprises CD3Z-associated primary T-cell immunodeficiency and the gene is CD3Z or CD247. In some embodiments, the disease comprises CD18 deficiency and the gene is ITGB2. In some embodiments, the disease comprises CD40L deficiency and the gene is CD40L. In some embodiments, the disease is congenital adrenal hyperplasia and the gene is CAH1. In some embodiments, the disease comprises CNS trauma and the gene is VEGF. In some embodiments, the disease comprises coronary heart disease and the gene is selected from FGA, FGB, and FGG. In some embodiments, the disease comprises MECP2 Duplication syndrome and Rett syndrome and the gene is MECP2. In some embodiments, the disease comprises a bleeding disorder (coagulation) and the gene is FXI. In some embodiments, the disease comprises fragile X syndrome and the gene is FMR1. In some embodiments, the disease comprises Fuchs corneal dystrophy and the gene is selected from ZEB1, SLC4A11, and LOXHD1. In some embodiments, the disease comprises GM2-Gangliosidoses (e.g., Tay Sachs Disease, Sandhoff disease) and the gene is selected from HEXA and HEXB. In some embodiments, the disease comprises Hearing loss disorders and the gene is DFNA36. In some embodiments, the disease is Pompe disease, including infantile onset Pompe disease (IOPD) and late onset Pompe disease (LOPD) and the gene is GAA. In some embodiments, the disease is Retinitis pigmentosa and the gene is selected from PDE6B, RHO, RP1, RP2, RPGR, PRPH2, IMPDH1, PRPF31, CRB1, PRPF8, TULP1, CA4, HPRPF3, ABCA4, EYS, CERKL, FSCN2, TOPORS, SNRNP200, PRCD, NR2E3, MERTK, USH2A, PROM1, KLHL7, CNGB1, TTC8, ARL6, DHDDS, BEST1, LRAT, SPARA7, CRX, CLRN1, RPE65, and WDR19. In some embodiments, the disease comprises Leber Congenital Amaurosis Type 10 and the gene is CEP290. In some embodiments, the disease is cardiovascular disease and/or lipodystrophies and the gene is selected from ABCG5, ABCG8, AGT, ANGPTL3, APOCIII, APOA1, APOL1, ARH, CDKN2B, CFB, CXCL12, FXI, FXII, GATA-4, MIA3, MKL2, MTHFD1L, MYH7, NKX2-5, NOTCH1, PKK, PCSK9, PSRC1, SMAD3, and TTR. In some embodiments, the disease comprises acromegaly and the gene is GHR. In some embodiments, the disease comprises acute myeloid leukemia and the gene is CD22. In some embodiments, the disease is diabetes and the gene is GCGR. In some embodiments, the disease is NAFLD/NASH and the gene is selected from DGAT2 and PNPLA3. In some embodiments, the disease is cancer and the gene is selected from STAT3, YAP1, FOXP3, AR (Prostate cancer), and IRF4 (multiple myeloma). In some embodiments, the disease is cystic fibrosis and the gene is CFTR. In some embodiments, the disease is Duchenne muscular dystrophy and the gene is DMD. In some embodiments, the disease is ornithine transcarbamylase deficiency and the gene is OTC. In some embodiments, the disease comprises angioedema and the gene is PKK. In some embodiments, the disease comprises thalassemia and the gene is TMPRSS6. In some embodiments, the disease comprises achondroplasia and the gene is FGFR3. In some embodiments, the disease comprises Cri du chat syndrome and the gene is selected from CTNND2. In some embodiments, the disease comprises sickle cell anemia and the gene is Beta globin gene. In some embodiments, the disease comprises Alagille Syndrome and the gene is selected from JAG1 and NOTCH2. In some embodiments, the disease comprises Charcot-Marie-Tooth disease and the gene is selected from PMP22 and MFN2. In some embodiments, the disease comprises Crouzon syndrome and the gene is selected from FGFR2, FGFR3, and FGFR3. In some embodiments, the disease comprises Dravet Syndrome and the gene is selected from SCN1A and SCN2A. In some embodiments, the disease comprises Emery-Dreifuss syndrome and the gene is selected from EMD, LMNA, SYNE1, SYNE2, FHL1, and TMEM43. In some embodiments, the disease comprises Factor V Leiden thrombophilia and the gene is F5. In some embodiments, the disease is fabry disease and the gene is GLA. In some embodiments, the disease is facioscapulohumeral muscular dystrophy and the gene is FSHDJ. In some embodiments, the disease comprises Fanconi anemia and the gene is selected from FANCA, FANCB, FANCC, FANCD1, FANCD2, FANCE, FANCF, FANCG, FANCI, FANCJ, FANCL, FANCM, FANCN, FANCP, FANCS, RAD51C, and XPF. In some embodiments, the disease comprises Familial Creutzfeld—Jakob disease and the gene is PRNP. In some embodiments, the disease comprises Familial Mediterranean Fever and the gene is MEFV. In some embodiments, the disease comprises Friedreich's ataxia and the gene is FXN. In some embodiments, the disease comprises Gaucher disease and the gene is GBA. In some embodiments, the disease comprises human papilloma virus (HPV) infection and the gene is HPV E7. In some embodiments, the disease comprises hemochromatosis and the gene is HFE, optionally comprising a C282Y mutation. In some embodiments, the disease comprises Hemophilia A and the gene is FVIII. In some embodiments, the disease is hereditary angioedema and the gene is SERPING1. In some embodiments, the disease comprises histiocytosis and the gene is CD1. In some embodiments, the disease comprises immunodeficiency 17 and the gene is CD3D. In some embodiments, the disease comprises immunodeficiency 13 and the gene is CD4. In some embodiments, the disease comprises Common Variable Immunodeficiency and the gene is selected from CD19 and CD81. In some embodiments, the disease comprises Joubert syndrome and the gene is selected from INPP5E, TMEM216, AHI1, NPHP1, CEP290, TMEM67, RPGRIP1L, ARL13B, CC2D2A, OFD1, TMEM138, TCTN3, ZNF423, and AMRC9. In some embodiments, the disease comprises leukocyte adhesion deficiency and the gene is CD18. In some embodiments, the disease comprises Li—Fraumeni syndrome and the gene is TP53. In some embodiments, the disease comprises lymphoproliferative syndrome and the gene is CD27. In some embodiments, the disease comprises Lynch syndrome and the gene is selected from MSH2, MLH1, MSH6, PMS2, PMS1, TGFBR2, and MLH3. In some embodiments, the disease comprises mantle cell lymphoma and the gene is CD5. In some embodiments, the disease comprises Marfan syndrome and the gene is FBN1. In some embodiments, the disease comprises mastocytosis and the gene is CD2. In some embodiments, the disease comprises methylmalonic acidemia and the gene is selected from MMAA, MMAB, and MUT. In some embodiments, the disease is mycosis fungoides and the gene is CD7. In some embodiments, the disease is myotonic dystrophy and the gene is selected from CNBP and DMPK. In some embodiments, the disease comprises neurofibromatosis and the gene is selected from NF1, and NF2. In some embodiments, the disease comprises osteogenesis imperfecta and the gene is selected from COL1A1, COL1A2, and IFITM5. In some embodiments, the disease is non-small cell lung cancer and the gene is selected from KRAS, EGFR, ALK, METex14, BRAF V600E, ROS1, RET, and NTRK. In some embodiments, the disease comprises Peutz—Jeghers syndrome and the gene is STK11. In some embodiments, the disease comprises polycystic kidney disease and the gene is selected from PKD1 and PKD2. In some embodiments, the disease comprises Severe Combined Immune Deficiency and the gene is selected from IL7R, RAG1, and JAK3. In some embodiments, the disease comprises PRKAG2 cardiac syndrome and the gene is PRKAG2. In some embodiments, the disease comprises spinocerebellar ataxia and the gene is selected from ATXN1, ATXN2, ATXN3, PLEKHG4, SPTBN2, CACNA1A, ATXN7, ATXN8OS, ATXN10, TTBK2, PPP2R2B, KCNC3, PRKCG, ITPR1, TBP, KCND3, and FGF14. In some embodiments, the disease is thrombophilia due to antithrombin III deficiency and the gene is SERPINC1. In some embodiments the disease is spinal muscular atrophy and the gene is SMNJ. In some embodiments, the disease comprises Usher Syndrome and the gene is selected from MYO7A, USH1C, CDH23, PCDH15, USH1G, USH2A, GPR98, DFNB31, and CLRN1. In some embodiments, the disease comprises von Willebrand disease and the gene is VWF. In some embodiments, the disease comprises Waardenburg syndrome and the gene is selected from PAX3, MITF, WS2B, WS2C, SNAI2, EDNRB, EDN3, and SOX10. In some embodiments, the disease comprises Wiskott-Aldrich Syndrome and the gene is WAS. In some embodiments, the disease comprises von Hippel—Lindau disease and the gene is VHL. In some embodiments, the disease comprises Wilson disease and the gene is ATP7B. In some embodiments, the disease comprises Zellweger syndrome and the gene is selected from PEX1, PEX2, PEX3, PEXS, PEX6, PEX10, PEX12, PEX13, PEX14, PEX16, PEX19, and PEX26. In some embodiments, the disease comprises infantile myofibromatosis and the gene is CD34. In some embodiments, the disease comprises platelet glycoprotein IV deficiency and the gene is CD36. In some embodiments, the disease comprises immunodeficiency with hyper-IgM type 3 and the gene is CD40. In some embodiments, the disease comprises hemolytic uremic syndrome and the gene is CD46.

[0490] In some embodiments, the disease comprises complement hyperactivation, angiopathic thrombosis, or protein-losing enteropathy and the gene is CD55. In some embodiments, the disease comprises hemolytic anemia and the gene is CD59. In some embodiments, the disease comprises calcification of joints and arteries and the gene is CD73. In some embodiments, the disease comprises immunoglobulin alpha deficiency and the gene is CD79A. In some embodiments, the disease comprises C syndrome and the gene is CD96. In some embodiments, the disease comprises hairy cell leukemia and the gene is CD123. In some embodiments, the disease comprises histiocytic sarcoma and the gene is CD163. In some embodiments, the disease comprises autosomal dominant deafness and the gene is CD164. In some embodiments, the disease comprises immunodeficiency 25 and the gene is CD247. In some embodiments, the disease comprises methymalonic acidemia due to transcobalamin receptor defect and the gene is CD320.

[0491] Cancer

[0492] In some embodiments, the disease is cancer. Non-limiting examples of cancers include: acute lymphoblastic leukemia; acute lymphoblastic lymphoma; acute lymphocytic leukemia; acute myelogenous leukemia; acute myeloid leukemia (adult/childhood); adrenocortical carcinoma; anal cancer; appendix cancer; astrocytoma; atypical teratoid/rhabdoid tumor; basal-cell carcinoma; bile duct cancer; bladder cancer; bone osteosarcoma; brain cancer; brain tumor; brainstem glioma; breast cancer; bronchial adenoma, carcinoid, or tumor; Burkitt lymphoma; carcinomacervical cancer; chronic lymphocytic leukemia; chronic myelogenous leukemia; chronic myeloid leukemia; colon cancer; colorectal cancer; emphysema; endometrial cancer; esophageal cancer; Ewing sarcoma; gallbladder cancer; gastric (stomach) cancer; gastrointestinal tumor; gliomahairy cell leukemia; head and neck cancer; liver cancer; Hodgkin's lymphoma; hypopharyngeal cancer; Kaposi Sarcoma; kidney cancer lip and oral cavity cancer; liposarcoma; lung cancer, non-small cell lung cancer; WaldenstrOm; melanoma; mesotheliomamyelogenous leukemia; myeloid leukemia; myeloma; nasopharyngeal carcinoma; neuroblastoma; non-Hodgkin's lymphoma; ovarian cancer; pancreatic cancer; pineal cancer; pituitary tumor; prostate cancer; rectal cancer; renal cell carcinomaretinoblastoma; spinal cord tumor; squamous cell carcinoma; squamous neck cancer; T-cell lymphoma, cutaneous (Mycosis Fungoides and Sézary syndrome); testicular cancer; throat cancer; thyroid cancer; urethral cancer; uterine cancervaginal cancer; and Wilms Tumor. In some embodiments, the cancer is a solid cancer (i.e., a tumor). In some embodiments, the cancer is selected from a blood cell cancer, a leukemia, and a lymphoma. The cancer may be a leukemia, such as, by way of non-limiting example, acute myeloid (or myelogenous) leukemia (AML), chronic myeloid (or myelogenous) leukemia (CML), acute lymphocytic (or lymphoblastic) leukemia (ALL), and chronic lymphocytic leukemia (CLL). In some embodiments, the cancer is any one of colon cancer, rectal cancer, renal-cell carcinoma, liver cancer, bladder cancer, cancer of the kidney or ureter, lung cancer, non-small cell lung cancer, cancer of the small intestine, esophageal cancer, melanoma, bone cancer, pancreatic cancer, skin cancer, brain cancer (e.g., glioblastoma), cancer of the head or neck, melanoma, uterine cancer, ovarian cancer, breast cancer, testicular cancer, cervical cancer, stomach cancer, Hodgkin's Disease, non-Hodgkin's lymphoma, and thyroid cancer.

[0493] In some embodiments, mutations are associated with cancer or are causative of cancer. The target nucleic acid, in some embodiments, comprises a portion of a gene comprising a mutation associated with a disease, such as cancer, a gene whose overexpression is associated with cancer, a tumor suppressor gene, an oncogene, a checkpoint inhibitor gene, a gene associated with cellular growth, a gene associated with cellular metabolism, a gene associated with cell cycle, or a combination thereof. Non-limiting examples of genes comprising a mutation associated with a disease such as cancer are ABL, ACE, AF4/HRX, AKT-2, ALK, ALK/NPM, AML1, AML1/MTG8, APC, ATM, AXIN2, AXL, BAP1, BARD1, BCL-2, BCL-3, BCL-6, BCR/ABL, BLM, BMPR1A, BRCA1, BRCA2, BRIP1, c-MYC, CASR, CCR5, CDC73, CDH1, CDK4, CDKN1B, CDKN1C, CDKN2A, CEBPA, CHEK2, CREBBP, CTNNA1, DBL, DEK/CAN, DICER1, DIS3L2, E2A/PBX1, EGFR, ENL/HRX, EPCAM, ERG/TLS, ERBB, ERBB-2, ETS-1, EWS/FLI-1, FH, FKRP, FLCN, FMS, FOS, FPS, GATA2, GCG, GLI, GPC3, GPGSP, GREM1, HER2/neu, HOX11, HOXB13, HRAS, HST, IL-3, INT-2, JAK1, JUN, KIT, KS3, K-SAM, LBC, LCK, LMO1, LMO2, L-MYC, LYL-1, LYT-10, LYT-10/Ca 1, MAS, MAX, MDM-2, MEN1, MET, MITF, MLH1, MLL, MOS, MSH1, MSH2, MSH3, MSH6, MTG8/AML1, MUTYH, MYB, MYH11/CBFB, NBN, NEU, NF1, NF2, N-MYC, NTHL1, OST, PALB2, PAX-5, PBX1/E2A, PCDCl, PDGFRA, PHOX2B, PIM-1, PM S2, POLD1, POLE, POT1, PPARG, PRAD-1, PRKAR1A, PTCH1, PTEN, RAD 50, RAD51C, RAD51D, RAF, RAR/PML, RAS-H, RAS-K, RAS-N, RB1, RECQL4, REL/NRG, RET, RHOM1, RHOM2, ROS, RUNX1, SDHA, SDHAF, SDHAF2, SDHB, SDHC, SDHD, SET/CAN, SIS, SKI, SMAD4, SMARCA4, SMARCB1, SMARCE1, SRC, STK11, SUFU, TAL1, TAL2, TAN-1, TIAM1, TERC, TERT, TIMP3, TMEM127, TNF, TP53, TRAC, TSC1, TSC2, TRK, VHL, WRN, and WT1. Non-limiting examples of oncogenes are KRAS, NRAS, BRAF, MYC, CTNNB1, and EGFR. In some embodiments, the oncogene is a gene that encodes a cyclin dependent kinase (CDK). Non-limiting examples of CDKs are Cdkl, Cdk4, Cdk5, Cdk7, Cdk8, Cdk9, Cdk11 and CDK20. Non-limiting examples of tumor suppressor genes are TP53, RB1, and PTEN.

[0494] Infections

[0495] Described herein are compositions and methods for treating an infection in a subject. Infections may be caused by a pathogen, e.g., bacteria, viruses, fungi, and parasites. Compositions and methods may modify a target nucleic acid associated with the pathogen or parasite causing the infection. In some embodiments, the target nucleic acid may be in the pathogen or parasite itself or in a cell, tissue or organ of the subject that the pathogen or parasite infects. In some embodiments, the methods described herein include treating an infection caused by one or more bacterial pathogens. Non-limiting examples of bacterial pathogens include Acholeplasma laidlawii, Brucella abortus, Chlamydia psittaci, Chlamydia trachomatis, Cryptococcus neoformans, Escherichia coli, Legionella pneumophila, Lyme disease spirochetes, methicillin-resistant Staphylococcus aureus, Mycobacterium leprae, Mycobacterium tuberculosis, Mycoplasma arginini, Mycoplasma arthritidis, Mycoplasma genitalium, Mycoplasma hyorhinis, Mycoplasma orale, Mycoplasma pneumoniae, Mycoplasma salivarium, Neisseria gonorrhoeae, Neisseria meningitidis, Pneumococcus, Pseudomonas aeruginosa, sexually transmitted infection, Streptococcus agalactiae, Streptococcus pyogenes, and Treponema pallidum.

[0496] In some embodiments, methods described herein include treating an infection caused by one or more viral pathogens. Non-limiting examples of viral pathogens include adenovirus, blue tongue virus, chikungunya, coronavirus (e.g., SARS-CoV-2), cytomegalovirus, Dengue virus, Ebola, Epstein-Barr virus, feline leukemia virus, Hemophilus influenzae B, Hepatitis virus A, Hepatitis virus B, Hepatitis virus C, herpes simplex virus I, herpes simplex virus II, human papillomavirus (HPV) including HPV16 and HPV18, human serum parvo-like virus, human T-cell leukemia viruses, immunodeficiency virus (e.g., HIV), influenza virus, lymphocytic choriomeningitis virus, measles virus, mouse mammary tumor virus, mumps virus, murine leukemia virus, polio virus, rabies virus, Reovirus, respiratory syncytial virus (RSV), rubella virus, Sendai virus, simian virus 40, Sindbis virus, varicella-zoster virus, vesicular stomatitis virus, wart virus, West Nile virus, yellow fever virus, or any combination thereof.

[0497] In some embodiments, methods described herein include treating an infection caused by one or more parasites. Non-limiting examples of parasites include helminths, annelids, platyhelminthes, nematodes, and thorny-headed worms. In some embodiments, parasitic pathogens comprise, without limitation, Babesia bovis, Echinococcus granulosus, Eimeria tenella, Leishmania tropica, Mesocestoides corti, Onchocerca volvulus, Plasmodium falciparum, Plasmodium vivax, Schistosoma japonicum, Schistosoma mansoni, Schistosoma spp., Taenia hydatigena, Taenia ovis, Taenia saginata, Theileria parva, Toxoplasma gondii, Toxoplasma spp., Trichinella spiralis, Trichomonas vaginalis, Trypanosoma brucei, Trypanosoma cruzi, Trypanosoma rangeli, Trypanosoma rhodesiense, Balantidium coli, Entamoeba histolytica, Giardia spp., Isospora spp., Trichomonas spp., or any combination thereof.

### ILLUSTRATIVE EMBODIMENTS

[0498] The present disclosure provides the following illustrative embodiments.

[0499] Embodiment 1. A composition that comprises an isolated polypeptide, or a recombinant nucleic acid encoding the isolated polypeptide, wherein the isolated polypeptide comprises an amino acid sequence that is at least 75% identical to any one of the sequences set forth in TABLE 1.

[0500] Embodiment 2. A composition that comprises:
[0501] (i) a polypeptide, or a nucleic acid encoding the polypeptide, wherein the polypeptide comprises an amino acid sequence that is at least 75% identical to any one of the sequences set forth in TABLE 1; and
[0502] (ii) an engineered guide nucleic acid or a DNA molecule that encodes the engineered guide nucleic acid.

[0503] Embodiment 3. A composition that comprises:
[0504] (i) a polypeptide, or a nucleic acid encoding the polypeptide, wherein the polypeptide comprises an amino acid sequence that is at least 75% identical to any one of the sequences set forth in TABLE 1; and
[0505] (ii) a donor nucleic acid; and
[0506] (iii) an engineered guide nucleic acid or a nucleic acid that encodes the engineered guide nucleic acid.

[0507] Embodiment 4. A composition that comprises:
[0508] (i) an isolated polypeptide, or a recombinant nucleic acid encoding the isolated polypeptide, wherein the isolated polypeptide comprises an amino acid sequence that is at least 75% identical to any one of the sequences set forth in TABLE 1; and
[0509] (ii) one or more partner polypeptides or isolated partner polypeptides, or one or more recombinant nucleic acids encoding the one or more partner polypeptides or isolated partner polypeptides.

[0510] Embodiment 5. A composition that comprises:
[0511] (i) a polypeptide, or a nucleic acid encoding the polypeptide, wherein the polypeptide comprises an amino acid sequence that is at least 75% identical to any one of the sequences set forth in TABLE 1;
[0512] (ii) one or more partner polypeptides, or one or more nucleic acids encoding the one or more partner polypeptides; and
[0513] (iii) a nucleic acid, wherein the nucleic acid is a donor nucleic acid, or an engineered guide nucleic acid or a nucleic acid that encodes the engineered guide nucleic acid.

[0514] Embodiment 6. The composition of embodiment 5 wherein the nucleic acid is a donor nucleic acid.

[0515] Embodiment 7. The composition of embodiment 5, wherein the nucleic acid is an engineered guide nucleic acid or a nucleic acid that encodes the engineered guide nucleic acid.

[0516] Embodiment 8. A composition that comprises:
[0517] (i) a polypeptide, or a nucleic acid encoding the polypeptide, wherein the polypeptide comprises an amino acid sequence that is at least 75% identical to any one of the sequences set forth in TABLE 1;
[0518] (ii) one or more partner polypeptides, or one or more nucleic acids encoding the one or more partner polypeptides;
[0519] (iii) a donor nucleic acid; and
[0520] (iv) an engineered guide nucleic acid or a nucleic acid that encodes the engineered guide nucleic acid.

[0521] Embodiment 9. The composition of any one of embodiments 4-8, wherein the one or more partner polypeptide comprises an amino acid sequence that is at least 75% identical to any one of the sequences set forth in TABLE 1.1.

[0522] Embodiment 10. A composition that comprises one or more isolated partner polypeptides or one or more recombinant nucleic acids encoding the one or more isolated partner polypeptides wherein the one or more isolated partner polypeptide comprises an amino acid sequence that is at least 75% identical to any one of the sequences set forth in TABLE 1.1.

[0523] Embodiment 11. A composition that comprises:
[0524] (i) one or more partner polypeptides, or one or more nucleic acids encoding the one or more partner polypeptides, wherein the one or more partner polypeptide comprises an amino acid sequence that is at least 75% identical to any one of the sequences set forth in TABLE 1.1; and
[0525] (ii) a nucleic acid, wherein the nucleic acid is a donor nucleic acid, or an engineered guide nucleic acid or a nucleic acid that encodes the engineered guide nucleic acid.

[0526] Embodiment 12. The composition of embodiment 11, wherein the nucleic acid is a donor nucleic acid.

[0527] Embodiment 13. The composition of embodiment 11, wherein the nucleic acid is an engineered guide nucleic acid or a nucleic acid that encodes the engineered guide nucleic acid.

[0528] Embodiment 14. A composition that comprises:
[0529] (i) one or more partner polypeptides, or one or more nucleic acids encoding the one or more partner polypeptides, wherein the one or more partner polypeptide comprises an amino acid sequence that is at least 75% identical to any one of the sequences set forth in TABLE 1.1; and
[0530] (ii) a donor nucleic acid and
[0531] (iii) an engineered guide nucleic acid or a nucleic acid that encodes the engineered guide nucleic acid.

[0532] Embodiment 15. The composition of any one of embodiments 1-8, wherein the polypeptide comprises an amino acid sequence that is at least 80% identical to any one of the sequences set forth in TABLE 1.

[0533] Embodiment 16. The composition of any one of embodiments 1-8, wherein the polypeptide comprises an amino acid sequence that is at least 85% identical to any one of the sequences set forth in TABLE 1.

[0534] Embodiment 17. The composition of any one of embodiments 1-8, wherein the polypeptide comprises an amino acid sequence that is at least 90% identical to any one of the sequences set forth in TABLE 1.

[0535] Embodiment 18. The composition of any one of embodiments 1-8, wherein the polypeptide comprises an amino acid sequence that is at least 95% identical to any one of the sequences set forth in TABLE 1.

[0536] Embodiment 19. The composition of any one of embodiments 1-8, wherein the polypeptide comprises an amino acid sequence that is 100% identical to any one of the sequences set forth in TABLE 1.

[0537] Embodiment 20. The composition of any one of embodiments 1-8, wherein the composition comprises one or more, two or more, three or more, four or more, five or more partner polypeptides, or one or more nucleic acids encoding the one or more, two or more, three or more, four or more, five or more partner polypeptides.

[0538] Embodiment 21. The composition of embodiment 20, wherein the one or more partner polypeptides comprises an amino acid sequence that is at least 75% identical to any one of the sequences set forth in TABLE 1.1.

[0539] Embodiment 22. The composition of embodiment 20, wherein the one or more partner polypeptides comprises an amino acid sequence that is at least 80% identical to any one of the sequences set forth in TABLE 1.1.

[0540] Embodiment 23. The composition of embodiment 20, wherein the one or more partner polypeptides comprises an amino acid sequence that is at least 85% identical to any one of the sequences set forth in TABLE 1.1.

[0541] Embodiment 24. The composition of embodiment 20, wherein the one or more partner polypeptides comprises an amino acid sequence that is at least 90% identical to any one of the sequences set forth in TABLE 1.1.

[0542] Embodiment 25. The composition of embodiment 20, wherein the one or more partner polypeptides comprises an amino acid sequence that is at least 95% identical to any one of the sequences set forth in TABLE 1.1.

[0543] Embodiment 26. The composition of embodiment 20, wherein the one or more partner polypeptides comprises an amino acid sequence that is identical to any one of the sequences set forth in TABLE 1.1.

[0544] Embodiment 27. The composition of embodiment 20, wherein the composition comprises two or more partner polypeptides, or one or more nucleic acids encoding the two or more partner polypeptides.

[0545] Embodiment 28. The composition of embodiment 20, wherein the composition comprises three or more partner polypeptides, or one or more nucleic acids encoding the three or more partner polypeptides.

[0546] Embodiment 29. The composition of embodiment 20, wherein the composition comprises four or more partner polypeptides, or one or more nucleic acids encoding the four or more partner polypeptides.

[0547] Embodiment 30. The composition of embodiment 20, wherein the composition comprises five or more partner polypeptides, or one or more nucleic acids encoding the five or more partner polypeptides.

[0548] Embodiment 31. The composition of any one of embodiments 26-30, wherein each partner polypeptide independently comprises an amino acid sequence that is 75% identical to any one of the sequences set forth in TABLE 1.1.

[0549] Embodiment 32. The composition of any one of embodiments 26-30, wherein each partner polypeptide independently comprises an amino acid sequence that is 80% identical to any one of the sequences set forth in TABLE 1.1.

[0550] Embodiment 33. The composition of any one of embodiments 26-30, wherein each partner polypeptide independently comprises an amino acid sequence that is 85% identical to any one of the sequences set forth in TABLE 1.1.

[0551] Embodiment 34. The composition of any one of embodiments 26-30, wherein each partner polypeptide independently comprises an amino acid sequence that is 90% identical to any one of the sequences set forth in TABLE 1.1.

[0552] Embodiment 35. The composition of any one of embodiments 26-30, wherein each partner polypeptide independently comprises an amino acid sequence that is 95% identical to any one of the sequences set forth in TABLE 1.1.

[0553] Embodiment 36. The composition of any one of embodiments 26-30, wherein each partner polypeptide independently comprises an amino acid sequence that is identical to any one of the sequences set forth in TABLE 1.1.

[0554] Embodiment 37. The composition of embodiment 20, wherein the composition comprises a polypeptide and a partner polypeptide combination as described in TABLE 6.

[0555] Embodiment 38. The composition of any one of embodiments 1-37, wherein the composition comprises the nucleic acid that is a donor nucleic acid.

[0556] Embodiment 39. The composition of embodiment 38, wherein the donor nucleic acid is linear double-stranded DNA.

[0557] Embodiment 40. The composition of embodiment 38, wherein the donor nucleic acid is not linear double-stranded DNA.

[0558] Embodiment 41. The composition of any one of embodiments 38-40, wherein the donor nucleic acid comprises a structural motif that is recognized by the polypeptide.

[0559] Embodiment 42. The composition of embodiments 41, wherein the structural motif is an intermolecular recombination motif.

[0560] Embodiment 43. The composition of any one of embodiments 41 or 42, wherein the structural motif is one or more inverted repeats, inverted terminal repeats, or combinations thereof.

[0561] Embodiment 44. The composition of any one of embodiments 1-43, wherein the composition modifies a target sequence in a target nucleic acid.

[0562] Embodiment 45. The composition of embodiment 44, wherein the target sequence is downstream to a protospacer adjacent motif (PAM).

[0563] Embodiment 46. The composition of embodiment 44, wherein the target nucleic acid comprises an insertion site.

[0564] Embodiment 47. The composition of embodiment 46, wherein the insertion site is recognized by a polypeptide or partner polypeptide.

[0565] Embodiment 48. The composition of any one of embodiments 44-47, wherein the composition comprises the nucleic acid encoding an engineered guide nucleic acid or the engineered guide nucleic acid, wherein the engineered guide nucleic acid comprises a first region and a second region comprising a nucleic acid sequence that is complementary to the target sequence in the target nucleic acid, wherein the first region and the second region are heterologous to each other.

[0566] Embodiment 49. The composition of embodiment 48, wherein the first region, at least partially, interacts with the polypeptide.

[0567] Embodiment 50. The composition of embodiment 48, wherein the first region, at least partially, interacts with the polypeptide, or partner polypeptide, or both.

[0568] Embodiment 51. The composition of any one of embodiments 48-50, wherein the engineered guide nucleic acid comprises at least 10 contiguous nucleotides that are complementary to a eukaryotic sequence.

[0569] Embodiment 52. The composition of any one of embodiments 48-50, wherein the engineered guide nucleic acid comprises one or more phosphorothioate (PS) backbone modifications, 2′-fluoro (2′-F) sugar modifications, or 2′-O-Methyl (2′ OMe) sugar modifications.

[0570] Embodiment 53. The composition of any one of embodiments 48-52, wherein the composition further comprises an additional engineered guide nucleic acid that binds a different loci of the target nucleic acid than the engineered guide nucleic acid.

[0571] Embodiment 54. The composition of embodiment 20, wherein the polypeptide or the partner polypeptide, or both, is fused to one or more heterologous polypeptide.

[0572] Embodiment 55. The composition of embodiment 54, wherein the polypeptide or the partner polypeptide, or both, is fused to one or more heterologous polypeptide, wherein the heterologous polypeptide is a nuclear localization signal (NLS).

[0573] Embodiment 56. The composition of any one of embodiments 54-55, wherein the polypeptide comprises a RuvC domain that is capable of cleaving a target nucleic acid.

[0574] Embodiment 57. The composition of any one of embodiments 54-55, wherein the polypeptide is a nuclease that is capable of cleaving at least one strand of a target nucleic acid.

[0575] Embodiment 58. The composition of any one of embodiments 54-55, wherein the polypeptide is a nuclease that is capable of modification of at least one strand of a target nucleic acid.

[0576] Embodiment 59. The composition of embodiment 58, wherein the modification of the target nucleic acid comprises cleaving the target nucleic acid, deleting a nucleic acid of the target nucleic acid, inserting a nucleic acid into the target nucleic acid, substituting a nucleic acid of the target nucleic acid with an alternative nucleic acid, more than one of the foregoing, or combinations thereof.

[0577] Embodiment 60. The composition of any one of embodiments 58-59, wherein the modification of the target nucleic acid comprises insertion of a nucleic acid into the target nucleic acid.

[0578] Embodiment 61. The composition of any one of embodiments 58-59, wherein the modification of the target nucleic acid comprises insertion of a donor nucleic acid, deletion of a target nucleic acid, insertion of a donor nucleic acid fragment, deletion of a target nucleic acid fragment, or combinations thereof.

[0579] Embodiment 62. The composition of any one of embodiments 58-59, wherein the modification of the target nucleic acid comprises insertion of a donor nucleic acid or donor nucleic acid fragment into the target nucleic acid.

[0580] Embodiment 63. The composition of any one of embodiments 58-59, wherein the modification of the target nucleic acid comprises deletion of a target nucleic acid or a target nucleic acid fragment from the target nucleic acid.

[0581] Embodiment 64. The composition of any one of embodiments 58-59, wherein a donor nucleic acid can be a nucleotide, a nucleotide sequence, a coding sequence, a gene, a gene fragment, an exon, an intron, an exon fragment, an intron fragment, a gene regulatory region, a gene regulatory region fragment, coding sequences thereof, or combinations thereof.

[0582] Embodiment 65. The composition of any one of embodiments 58-59, wherein the modification of the target nucleic acid comprises site-specific recombinase activity.

[0583] Embodiment 66. The composition of any one of embodiments 58-59, wherein the modification of the target nucleic acid comprises transposase or transposase-like activity.

[0584] Embodiment 67. The composition of any one of embodiments 58-59, wherein the modification of the target nucleic acid comprises modification of a length of about 100 base pairs to about 500 base pairs of the target nucleic acid.

[0585] Embodiment 68. The composition of any one of embodiments 44-67, wherein the target sequence is within a human gene.

[0586] Embodiment 69. A nucleic acid expression vector that encodes a polypeptide, wherein the polypeptide comprises an amino acid sequence that is at least 75% identical to any one of the sequences set forth in TABLE 1.

[0587] Embodiment 70. A library of nucleic acid expression vectors comprising the nucleic acid expression vector of embodiment 69, wherein the nucleic acid expression vector encoding the polypeptide further encodes a partner polypeptide or wherein the library further comprises a separate nucleic acid expression vector encoding the partner polypeptide, and wherein the partner polypeptide comprises an amino acid sequence that is at least 75% identical to any one of the sequences set forth in TABLE 1.1.

[0588] Embodiment 71. The library of embodiment 70, wherein the nucleic acid expression vector of embodiment 69 or 70 encoding the polypeptide and/or the partner polypeptide further encodes a donor nucleic acid, or wherein the library further comprises a separate nucleic acid expression vector encoding the donor nucleic acid.

[0589] Embodiment 72. The library of embodiment 70, wherein the nucleic acid expression vector of any one of embodiments 69-71 encoding the polypeptide, the partner polypeptide, and/or a donor nucleic acid further encodes a target nucleic acid or wherein the library further comprises a separate nucleic acid expression vector encoding the target nucleic acid.

[0590] Embodiment 73. The nucleic acid expression vector or library of nucleic acid expression vectors of any one of embodiments 69 to 72, wherein at least one nucleic acid expression vector is a viral vector.

[0591] Embodiment 74. The nucleic acid expression vector or library of nucleic acid expression vectors of embodiment 73, wherein the viral vector is an adeno associated viral (AAV) vector.

[0592] Embodiment 75. The nucleic acid expression vector or library of nucleic acid expression vectors of any one of embodiments 69 to 72, wherein at least one nucleic acid expression vector is a lipid or a lipid nanoparticle.

[0593] Embodiment 76. A pharmaceutical composition, comprising the composition of any one of embodiments 1-68 or the nucleic acid expression vector or library of any one of embodiments 69-75; and a pharmaceutically acceptable excipient.

[0594] Embodiment 77. A system comprising the composition of any one of embodiments 1-68 or the nucleic acid expression vector or library of any one of embodiments 69-75.

[0595] Embodiment 78. The system of embodiment 77, comprising at least one detection reagent for detecting a target nucleic acid.

[0596] Embodiment 79. The system of embodiment 78, wherein the at least one detection reagent is selected from a reporter nucleic acid, a detection moiety, an additional polypeptide, or a combination thereof, optionally wherein the reporter nucleic acid comprises a fluorophore, a quencher, or a combination thereof.

[0597] Embodiment 80. The system of any one of embodiments 78-79, wherein the at least one detection reagent is operably linked to a polypeptide or partner polypeptide, such that a detection event occurs upon contacting the system with a target nucleic acid.

[0598] Embodiment 81. The system of any one of embodiments 77-80, comprising at least one amplification reagent for amplifying a target nucleic acid.

[0599] Embodiment 82. The system of embodiment 81, wherein the at least one amplification reagent is selected from the group consisting of a primer, an activator, a dNTP, an rNTP, and combinations thereof.

[0600] Embodiment 83. A method of modifying a target nucleic acid within a human gene, or associated with expression of a human gene, the method comprising contacting the target nucleic acid with the composition of any one of embodiments 1-68, the nucleic acid expression vector or library of any one of embodiments 69-75, the pharmaceutical composition of embodiment 76, or the system of any one of embodiments 77-82, thereby modifying the target nucleic acid.

[0601] Embodiment 84. The method of embodiment 83, wherein the modifying of the target nucleic acid comprises insertion or deletion of an exon, intron, exon fragment, intron fragment, gene regulatory region, gene regulatory region fragment, or any combinations thereof.

[0602] Embodiment 85. The method of embodiment 83, wherein the modifying of the target nucleic acid comprises insertion of an exon, intron, exon fragment, intron fragment, gene regulatory region, gene regulatory region fragment, or combinations thereof.

[0603] Embodiment 86. The method of any one of embodiments 83-85, further comprising contacting the target nucleic acid with a guide nucleic acid.

[0604] Embodiment 87. The method of any one of embodiments 83-86, wherein the method is performed in a cell.

[0605] Embodiment 88. The method of embodiment 87, wherein the method is performed in vivo.

[0606] Embodiment 89. The method of any one of embodiments 83-88, wherein the target nucleic acid comprises a mutation associated with a disease.

[0607] Embodiment 90. The method of embodiment 89, wherein the disease is a genetic disorder.

[0608] Embodiment 91. The method of embodiment 90, wherein the genetic disorder is a neurological disorder.

[0609] Embodiment 92. The method of any one of embodiments 83-91, wherein the target nucleic acid is encoded by a gene recited in TABLE 4.

[0610] Embodiment 93. The method of embodiment 92, wherein the gene comprises one or more mutations.

[0611] Embodiment 94. The method of embodiment 93, wherein the one or more mutations comprise a point mutation, a single nucleotide polymorphism (SNP), a chromosomal mutation, a copy number mutation, or any combination thereof.

[0612] Embodiment 95. The method of embodiment 90, wherein the disease is any one of the diseases recited in TABLE 5.

[0613] Embodiment 96. A cell comprising the composition of any one of embodiments 1-68 or the nucleic acid expression vector or library of any one of embodiments 69-75.

[0614] Embodiment 97. A cell that comprises a target nucleic acid modified by the composition of any one of embodiments 1-68 or the nucleic acid expression vector or library of any one of embodiments 69-75.

[0615] Embodiment 98. The cell of embodiment 96 or 97, wherein the cell is a eukaryotic cell.

[0616] Embodiment 99. The cell of any one of embodiments 96-98, wherein the cell is a mammalian cell.

[0617] Embodiment 100. The cell of any one of embodiments 96-99, wherein the cell is a human cell.

[0618] Embodiment 101. A population of cells that comprises at least one cell of any one of embodiments 95-100.

[0619] Embodiment 102. A method of treating a disease associated with a mutation or aberrant expression of a human gene in a subject in need thereof, the method comprising administering to the subject the pharmaceutical composition of embodiment 76.

[0620] Embodiment 103. The method of embodiment 102, wherein the disease is a genetic disorder.

[0621] Embodiment 104. The method of embodiment 103, wherein the genetic disorder is a neurological disorder.

[0622] Embodiment 105. The method of embodiment 102, wherein the human gene is a gene recited in TABLE 4.

[0623] Embodiment 106. The method of embodiment 102, wherein the disease is any one of the diseases recited in TABLE 5.

### Sequences and Tables

[0624] TABLE 1 provides illustrative amino acid sequences of effector proteins that are useful in the compositions, systems and methods described herein. (SEQ ID corresponds to Effector ID in column to its immediate right).

TABLE 1
EXEMPLARY AMINO ACID SEQUENCE(S)
OF EFFECTOR PROTEIN(S)

| SEQ ID NO: | Effector ID |
|---|---|
| 1 | 2456001 |
| 2 | 2456475 |
| 3 | 2456558 |
| 4 | 2457490 |
| 5 | 2457658 |
| 6 | 2457689 |
| 7 | 2457793 |
| 8 | 2457935 |
| 9 | 2458067 |
| 10 | 2459252 |
| 11 | 2460727 |
| 12 | 2460813 |
| 13 | 2460841 |
| 14 | 2460904 |
| 15 | 2460927 |
| 16 | 2460977 |
| 17 | 2462434 |
| 18 | 2462454 |
| 19 | 2463018 |
| 20 | 2463119 |
| 21 | 2464186 |
| 22 | 2464978 |
| 23 | 2465492 |
| 24 | 2465502 |
| 25 | 2465535 |
| 26 | 2465684 |
| 27 | 2465703 |
| 28 | 2466615 |
| 29 | 2466640 |
| 30 | 2466645 |
| 31 | 2466655 |
| 32 | 2466697 |
| 33 | 2466980 |
| 34 | 2467447 |
| 35 | 2467918 |
| 36 | 2467960 |
| 37 | 2467986 |
| 38 | 2468305 |
| 39 | 2468372 |
| 40 | 2468693 |
| 41 | 2468823 |
| 42 | 2468912 |
| 43 | 2468988 |
| 44 | 2469268 |
| 45 | 2469304 |
| 46 | 2469439 |
| 47 | 2469808 |
| 48 | 2469819 |
| 49 | 2469824 |
| 50 | 2470354 |
| 51 | 2473512 |
| 52 | 2482511 |
| 53 | 2483526 |
| 54 | 2483741 |
| 55 | 2489259 |
| 56 | 2490524 |
| 57 | 2490801 |
| 58 | 2490995 |
| 59 | 2491088 |
| 60 | 2504283 |
| 61 | 2504313 |
| 62 | 2504384 |
| 63 | 2504398 |
| 64 | 2504480 |
| 65 | 2504486 |
| 66 | 2504537 |
| 67 | 2504664 |
| 68 | 2504681 |
| 69 | 2504885 |
| 70 | 2505104 |
| 71 | 2505192 |
| 72 | 2505203 |
| 73 | 2505234 |
| 74 | 2505278 |
| 75 | 2505666 |
| 76 | 2505670 |
| 77 | 2505886 |
| 78 | 2505958 |
| 79 | 2506634 |
| 80 | 2506662 |
| 81 | 2506867 |
| 82 | 2507107 |
| 83 | 2507193 |
| 84 | 2507535 |
| 85 | 2507558 |
| 86 | 2507740 |
| 87 | 2507920 |
| 88 | 2508016 |
| 89 | 2508076 |
| 90 | 2508184 |
| 91 | 2508454 |
| 92 | 2509122 |
| 93 | 2509421 |
| 94 | 2509689 |
| 95 | 2509812 |
| 96 | 2510622 |
| 97 | 2512817 |
| 98 | 2513039 |
| 99 | 2513437 |
| 100 | 2514574 |
| 101 | 2514639 |
| 102 | 2514917 |
| 103 | 2514993 |
| 104 | 2515125 |
| 105 | 2519365 |
| 106 | 2520309 |
| 107 | 2520321 |
| 108 | 2520815 |
| 109 | 2520872 |
| 110 | 2521221 |
| 111 | 2521365 |
| 112 | 2521462 |
| 113 | 2521488 |
| 114 | 2521520 |
| 115 | 2521566 |
| 116 | 2521693 |
| 117 | 2521795 |
| 118 | 2521836 |
| 119 | 2521914 |
| 120 | 2522106 |
| 121 | 2522156 |
| 122 | 2522180 |
| 123 | 2522205 |
| 124 | 2522208 |
| 125 | 2522283 |
| 126 | 2522388 |
| 127 | 2522406 |
| 128 | 2522427 |
| 129 | 2522444 |
| 130 | 2522739 |
| 131 | 2522792 |
| 132 | 2522843 |
| 133 | 2523900 |
| 134 | 2526395 |
| 135 | 2526520 |
| 136 | 2532645 |
| 137 | 2532927 |
| 138 | 2533225 |
| 139 | 2533240 |
| 140 | 2533877 |
| 141 | 2534949 |
| 142 | 2535292 |
| 143 | 2536836 |
| 144 | 2537132 |
| 145 | 2537146 |
| 146 | 2537379 |
| 147 | 2538576 |
| 148 | 2538582 |
| 149 | 2538893 |
| 150 | 2538912 |
| 151 | 2539582 |
| 152 | 2540760 |
| 153 | 2542176 |
| 154 | 2542314 |
| 155 | 2542321 |
| 156 | 2542504 |
| 157 | 2542546 |
| 158 | 2542603 |
| 159 | 2542660 |
| 160 | 2542678 |
| 161 | 2542856 |
| 162 | 2542961 |
| 163 | 2542982 |
| 164 | 2542993 |
| 165 | 2543049 |
| 166 | 2543336 |
| 167 | 2543415 |
| 168 | 2543456 |
| 169 | 2543553 |
| 170 | 2543727 |
| 171 | 2544565 |
| 172 | 2545576 |
| 173 | 2545774 |
| 174 | 2549059 |
| 175 | 2549426 |
| 176 | 2549542 |
| 177 | 2549749 |
| 178 | 2551318 |
| 179 | 2552263 |
| 180 | 2553740 |
| 181 | 2555300 |
| 182 | 2555429 |
| 183 | 2555732 |
| 184 | 2555743 |
| 185 | 2557277 |
| 186 | 2559207 |
| 187 | 2559356 |
| 188 | 2559367 |
| 189 | 2559541 |
| 190 | 2559544 |
| 191 | 2559747 |
| 192 | 2560387 |
| 193 | 2560437 |
| 194 | 2560621 |
| 195 | 2561184 |
| 196 | 2563225 |
| 197 | 2563834 |
| 198 | 2564858 |
| 199 | 2566876 |
| 200 | 2568378 |
| 201 | 2569008 |
| 202 | 2569140 |
| 203 | 2570277 |
| 204 | 2570395 |
| 205 | 2570998 |
| 206 | 2572578 |
| 207 | 2572822 |
| 208 | 2572874 |
| 209 | 2572904 |
| 210 | 2573626 |
| 211 | 2573858 |
| 212 | 2573979 |
| 213 | 2574339 |
| 214 | 2574480 |
| 215 | 2575022 |
| 216 | 2575248 |
| 217 | 2575975 |
| 218 | 2576124 |
| 219 | 2576604 |
| 220 | 2576783 |
| 221 | 2578899 |
| 222 | 2579280 |
| 223 | 2580408 |
| 224 | 2580412 |
| 225 | 2581095 |
| 226 | 2581145 |
| 227 | 2581162 |
| 228 | 2581239 |
| 229 | 2581436 |
| 230 | 2581467 |
| 231 | 2581554 |
| 232 | 2581611 |
| 233 | 2581622 |
| 234 | 2581692 |
| 235 | 2581801 |
| 236 | 2581900 |
| 237 | 2582748 |
| 238 | 2585153 |
| 239 | 2585490 |
| 240 | 2585740 |
| 241 | 2585756 |
| 242 | 2585858 |
| 243 | 2585862 |
| 244 | 2585963 |
| 245 | 2585975 |
| 246 | 2587058 |
| 247 | 2594512 |
| 248 | 2595285 |
| 249 | 2595296 |
| 250 | 2596238 |
| 251 | 2607761 |
| 252 | 2610314 |
| 253 | 2618595 |
| 254 | 2618809 |
| 255 | 2619117 |
| 256 | 2619261 |
| 257 | 2621890 |
| 258 | 2621901 |
| 259 | 2628024 |
| 260 | 2629316 |
| 261 | 2631654 |
| 262 | 2631725 |
| 263 | 2631733 |
| 264 | 2631899 |
| 265 | 2631942 |
| 266 | 2635243 |
| 267 | 2636967 |
| 268 | 2637525 |
| 269 | 2639392 |
| 270 | 2639486 |
| 271 | 2639844 |
| 272 | 2640111 |
| 273 | 2640390 |
| 274 | 2640394 |
| 275 | 2640521 |
| 276 | 2640532 |
| 277 | 2641112 |
| 278 | 2641808 |
| 279 | 2641851 |
| 280 | 2642080 |
| 281 | 2642178 |
| 282 | 2642301 |
| 283 | 2642927 |
| 284 | 2643487 |
| 285 | 2643718 |
| 286 | 2643741 |
| 287 | 2643749 |
| 288 | 2643777 |
| 289 | 2645072 |
| 290 | 2645389 |
| 291 | 2645407 |
| 292 | 2645582 |
| 293 | 2645604 |
| 294 | 2645609 |
| 295 | 2645629 |
| 296 | 2645965 |
| 297 | 2645994 |
| 298 | 2646041 |
| 299 | 2646098 |
| 300 | 2646113 |
| 301 | 2646119 |
| 302 | 2646278 |
| 303 | 2646295 |
| 304 | 2646303 |
| 305 | 2646334 |
| 306 | 2646355 |
| 307 | 2646358 |
| 308 | 2646390 |
| 309 | 2646408 |
| 310 | 2646830 |
| 311 | 2646934 |
| 312 | 2646962 |
| 313 | 2647076 |
| 314 | 2647091 |
| 315 | 2647113 |
| 316 | 2647159 |
| 317 | 2647165 |
| 318 | 2647204 |
| 319 | 2647896 |
| 320 | 2648017 |
| 321 | 2648219 |
| 322 | 2648249 |
| 323 | 2648260 |
| 324 | 2648589 |
| 325 | 2648617 |
| 326 | 2648628 |
| 327 | 2648641 |
| 328 | 2648953 |
| 329 | 2649138 |
| 330 | 2649178 |
| 331 | 2649330 |
| 332 | 2649348 |
| 333 | 2649388 |
| 334 | 2649407 |
| 335 | 2649418 |
| 336 | 2649881 |
| 337 | 2650573 |
| 338 | 2650642 |
| 339 | 2650650 |
| 340 | 2650663 |
| 341 | 2650676 |
| 342 | 2652498 |
| 343 | 2655342 |
| 344 | 2655877 |
| 345 | 2656012 |
| 346 | 2656041 |
| 347 | 2656102 |
| 348 | 2656122 |
| 349 | 2656637 |
| 350 | 2656683 |
| 351 | 2656732 |
| 352 | 2656745 |
| 353 | 2656872 |
| 354 | 2656881 |
| 355 | 2657264 |
| 356 | 2657281 |
| 357 | 2658718 |
| 358 | 2658736 |
| 359 | 2659684 |
| 360 | 2660855 |
| 361 | 2661138 |
| 362 | 2661149 |
| 363 | 2661203 |
| 364 | 2661243 |
| 365 | 2661723 |
| 366 | 2661753 |
| 367 | 2662365 |
| 368 | 2663028 |
| 369 | 2663104 |
| 370 | 2663367 |
| 371 | 2663380 |
| 372 | 2663400 |
| 373 | 2663750 |
| 374 | 2663760 |
| 375 | 2663780 |
| 376 | 2663815 |
| 377 | 2663833 |
| 378 | 2663974 |
| 379 | 2664009 |
| 380 | 2664025 |
| 381 | 2664156 |
| 382 | 2664342 |
| 383 | 2664593 |
| 384 | 2664914 |
| 385 | 2664957 |
| 386 | 2664986 |
| 387 | 2665006 |
| 388 | 2665109 |
| 389 | 2665325 |
| 390 | 2665379 |
| 391 | 2665417 |
| 392 | 2665447 |
| 393 | 2666085 |
| 394 | 2666163 |
| 395 | 2666290 |
| 396 | 2666471 |
| 397 | 2666830 |
| 398 | 2667583 |
| 399 | 2667596 |
| 400 | 2667609 |
| 401 | 2667637 |
| 402 | 2667659 |
| 403 | 2667740 |
| 404 | 2667863 |
| 405 | 2667874 |
| 406 | 2668940 |
| 407 | 2669158 |
| 408 | 2669252 |
| 409 | 2669317 |
| 410 | 2669455 |
| 411 | 2670262 |
| 412 | 2670431 |
| 413 | 2670948 |
| 414 | 2671509 |
| 415 | 2671561 |
| 416 | 2673019 |
| 417 | 2673030 |
| 418 | 2673085 |
| 419 | 2673122 |
| 420 | 2673750 |
| 421 | 2674873 |
| 422 | 2674903 |
| 423 | 2674920 |
| 424 | 2675029 |
| 425 | 2675057 |
| 426 | 2675141 |
| 427 | 2675820 |
| 428 | 2675905 |
| 429 | 2678009 |
| 430 | 2678104 |
| 431 | 2678129 |
| 432 | 2680715 |
| 433 | 2680787 |
| 434 | 2680813 |
| 435 | 2681033 |
| 436 | 2681040 |
| 437 | 2681339 |
| 438 | 2682278 |
| 439 | 2682344 |
| 440 | 2682347 |
| 441 | 2684692 |
| 442 | 2684983 |
| 443 | 2685267 |
| 444 | 2687981 |
| 445 | 2687986 |
| 446 | 2687998 |
| 447 | 2688086 |
| 448 | 2688136 |
| 449 | 2688183 |
| 450 | 2688225 |
| 451 | 2688430 |
| 452 | 2689663 |
| 453 | 2690183 |
| 454 | 2690859 |

[0625] TABLE 1.1 provides illustrative amino acid sequences of effector partner proteins that are useful in the compositions, systems and methods described herein.

TABLE 2.1
EXEMPLARY AMINO ACID SEQUENCE(S)
OF EFFECTOR PARTNER PROTEIN(S)

| SEQ ID NO: | Partner ID |
|---|---|
| 455 | 2464187 |
| 456 | 2466643 |
| 457 | 2482514 |
| 458 | 2504538 |
| 459 | 2505190 |
| 460 | 2509417 |
| 461 | 2533878 |
| 462 | 2542964 |
| 463 | 2533879 |
| 464 | 2543050 |
| 465 | 2551321 |
| 466 | 2575246 |
| 467 | 2635246 |
| 468 | 2646099 |
| 469 | 2646116 |
| 470 | 2646356 |
| 471 | 2648954 |
| 472 | 2650569 |
| 473 | 2646104 |
| 474 | 2650646 |
| 475 | 2650661 |
| 476 | 2650672 |
| 477 | 2658714 |
| 478 | 2658739 |
| 479 | 2660856 |
| 480 | 2663365 |
| 481 | 2663378 |
| 482 | 2663398 |
| 483 | 2664026 |
| 484 | 2664917 |
| 485 | 2665105 |
| 486 | 2666088 |
| 487 | 2667599 |
| 488 | 2673120 |
| 489 | 2674906 |
| 490 | 2663377 |
| 491 | 2673119 |
| 492 | 2681036 |
| 493 | 2585758 |
| 494 | 2463120 |
| 495 | 2468301 |
| 496 | 2468820 |
| 497 | 2468908 |
| 498 | 2468985 |
| 499 | 2504660 |
| 500 | 2537141 |
| 501 | 2539580 |
| 502 | 2542319 |
| 503 | 2542604 |
| 504 | 2640108 |
| 505 | 2585757 |
| 506 | 2631650 |
| 507 | 2643716 |
| 508 | 2646274 |
| 509 | 2646298 |
| 510 | 2647205 |
| 511 | 2648613 |
| 512 | 2648626 |
| 513 | 2641805 |
| 514 | 2456002 |
| 515 | 2465685 |
| 516 | 2466638 |
| 517 | 2466656 |
| 518 | 2466698 |
| 519 | 2504281 |
| 520 | 2504385 |
| 521 | 2505204 |
| 522 | 2507556 |
| 523 | 2540761 |
| 524 | 2642175 |
| 525 | 2569006 |
| 526 | 2572875 |
| 527 | 2646391 |
| 528 | 2646406 |
| 529 | 2647077 |
| 530 | 2647111 |
| 531 | 2656010 |
| 532 | 2656743 |
| 533 | 2661139 |
| 534 | 2661150 |
| 535 | 2663751 |
| 536 | 2663831 |
| 537 | 2663972 |
| 538 | 2664157 |
| 539 | 2664594 |
| 540 | 2666828 |
| 541 | 2505279 |
| 542 | 2538574 |
| 543 | 2542502 |
| 544 | 2568379 |
| 545 | 2581237 |
| 546 | 2641110 |
| 547 | 2645070 |
| 548 | 2646304 |
| 549 | 2460978 |
| 550 | 2462455 |
| 551 | 2463019 |
| 552 | 2508182 |
| 553 | 2515126 |
| 554 | 2535290 |
| 555 | 2543457 |
| 556 | 2545577 |
| 557 | 2585863 |
| 558 | 2587059 |
| 559 | 2619115 |
| 560 | 2621888 |
| 561 | 2640392 |
| 562 | 2640530 |
| 563 | 2646353 |
| 564 | 2655343 |
| 565 | 2656638 |
| 566 | 2656870 |
| 567 | 2657279 |
| 568 | 2661204 |
| 569 | 2663105 |
| 570 | 2664958 |
| 571 | 2665323 |
| 572 | 2665380 |
| 573 | 2665418 |
| 574 | 2666288 |
| 575 | 2667638 |
| 576 | 2668938 |
| 577 | 2671559 |
| 578 | 2682345 |
| 579 | 2682348 |
| 580 | 2684690 |
| 581 | 2688226 |
| 582 | 2690860 |
| 583 | 2466978 |
| 584 | 2507105 |
| 585 | 2509810 |
| 586 | 2513037 |
| 587 | 2581093 |
| 588 | 2581146 |
| 589 | 2581465 |
| 590 | 2582746 |
| 591 | 2585738 |
| 592 | 2631897 |
| 593 | 2642081 |
| 594 | 2648590 |
| 595 | 2456476 |
| 596 | 2457488 |
| 597 | 2457659 |
| 598 | 2457687 |
| 599 | 2460728 |
| 600 | 2465490 |
| 601 | 2465500 |
| 602 | 2465533 |
| 603 | 2469266 |
| 604 | 2469302 |
| 605 | 2469820 |
| 606 | 2483742 |
| 607 | 2489257 |
| 608 | 2490525 |
| 609 | 2490993 |
| 610 | 2504396 |
| 611 | 2504886 |
| 612 | 2505102 |
| 613 | 2505235 |
| 614 | 2505668 |
| 615 | 2505959 |
| 616 | 2506635 |
| 617 | 2507533 |
| 618 | 2512818 |
| 619 | 2522844 |
| 620 | 2523898 |
| 621 | 2526396 |
| 622 | 2526521 |
| 623 | 2534950 |
| 624 | 2538580 |
| 625 | 2542658 |
| 626 | 2549427 |
| 627 | 2549750 |
| 628 | 2552264 |
| 629 | 2553741 |
| 630 | 2555741 |
| 631 | 2557278 |
| 632 | 2559205 |
| 633 | 2559354 |
| 634 | 2560438 |
| 635 | 2560622 |
| 636 | 2564856 |
| 637 | 2570278 |
| 638 | 2570396 |
| 639 | 2570999 |
| 640 | 2573856 |
| 641 | 2576781 |
| 642 | 2578900 |
| 643 | 2580409 |
| 644 | 2581163 |
| 645 | 2581434 |
| 646 | 2581609 |
| 647 | 2581620 |
| 648 | 2581693 |
| 649 | 2581799 |
| 650 | 2581898 |
| 651 | 2585859 |
| 652 | 2585964 |
| 653 | 2585976 |
| 654 | 2595286 |
| 655 | 2595297 |
| 656 | 2619262 |
| 657 | 2636968 |
| 658 | 2640109 |
| 659 | 2641806 |
| 660 | 2641852 |
| 661 | 2642176 |
| 662 | 2643775 |
| 663 | 2645583 |
| 664 | 2645605 |
| 665 | 2645607 |
| 666 | 2645630 |
| 667 | 2646117 |
| 668 | 2646932 |
| 669 | 2646963 |
| 670 | 2647160 |
| 671 | 2647163 |
| 672 | 2648220 |
| 673 | 2648250 |
| 674 | 2649176 |
| 675 | 2649328 |
| 676 | 2649349 |
| 677 | 2649386 |
| 678 | 2649408 |
| 679 | 2649882 |
| 680 | 2655878 |
| 681 | 2656681 |
| 682 | 2656733 |
| 683 | 2662363 |
| 684 | 2663758 |
| 685 | 2663781 |
| 686 | 2663813 |
| 687 | 2664010 |
| 688 | 2664987 |
| 689 | 2665007 |
| 690 | 2665448 |
| 691 | 2666469 |
| 692 | 2667584 |
| 693 | 2667864 |
| 694 | 2667875 |
| 695 | 2669250 |
| 696 | 2670429 |
| 697 | 2671510 |
| 698 | 2673017 |
| 699 | 2673028 |
| 700 | 2673086 |
| 701 | 2674874 |
| 702 | 2675058 |
| 703 | 2675139 |
| 704 | 2675822 |
| 705 | 2675906 |
| 706 | 2678127 |
| 707 | 2680814 |
| 708 | 2681034 |
| 709 | 2681340 |
| 710 | 2684984 |
| 711 | 2685265 |
| 712 | 2687984 |
| 713 | 2687996 |
| 714 | 2689664 |
| 715 | 2457936 |
| 716 | 2460928 |
| 717 | 2464976 |
| 718 | 2467448 |
| 719 | 2469809 |
| 720 | 2469822 |
| 721 | 2505667 |
| 722 | 2505887 |
| 723 | 2506660 |
| 724 | 2509687 |
| 725 | 2510620 |
| 726 | 2514640 |
| 727 | 2514918 |
| 728 | 2532646 |
| 729 | 2533223 |
| 730 | 2542857 |
| 731 | 2543334 |
| 732 | 2544566 |
| 733 | 2559748 |
| 734 | 2560388 |
| 735 | 2618810 |
| 736 | 2639845 |
| 737 | 2642928 |
| 738 | 2645387 |
| 739 | 2645405 |
| 740 | 2648261 |
| 741 | 2649419 |
| 742 | 2456555 |
| 743 | 2458064 |
| 744 | 2460811 |
| 745 | 2462435 |
| 746 | 2504310 |
| 747 | 2506868 |
| 748 | 2520310 |
| 749 | 2520322 |
| 750 | 2520870 |
| 751 | 2537380 |
| 752 | 2542674 |
| 753 | 2549056 |
| 754 | 2555301 |
| 755 | 2561182 |
| 756 | 2563226 |
| 757 | 2566873 |
| 758 | 2572905 |
| 759 | 2573624 |
| 760 | 2574478 |
| 761 | 2585488 |
| 762 | 2618591 |
| 763 | 2621908 |
| 764 | 2639393 |
| 765 | 2642302 |
| 766 | 2645992 |
| 767 | 2646335 |
| 768 | 2646831 |
| 769 | 2652499 |
| 770 | 2656038 |
| 771 | 2656119 |
| 772 | 2656882 |
| 773 | 2657265 |
| 774 | 2659685 |
| 775 | 2661240 |
| 776 | 2661724 |
| 777 | 2664339 |
| 778 | 2667741 |
| 779 | 2669159 |
| 780 | 2669318 |
| 781 | 2670263 |
| 782 | 2670945 |
| 783 | 2674917 |
| 784 | 2680716 |
| 785 | 2682279 |
| 786 | 2688083 |
| 787 | 2688137 |
| 788 | 2688184 |
| 789 | 2460843 |
| 790 | 2460905 |
| 791 | 2468691 |
| 792 | 2483527 |
| 793 | 2504481 |
| 794 | 2504484 |
| 795 | 2507190 |
| 796 | 2508017 |
| 797 | 2508077 |
| 798 | 2520813 |
| 799 | 2542315 |
| 800 | 2542544 |
| 801 | 2543412 |
| 802 | 2579281 |
| 803 | 2581551 |
| 804 | 2628025 |
| 805 | 2631726 |
| 806 | 2631730 |
| 807 | 2640528 |
| 808 | 2643488 |
| 809 | 2643738 |
| 810 | 2643750 |
| 811 | 2645962 |
| 812 | 2646042 |
| 813 | 2647893 |
| 814 | 2466613 |
| 815 | 2467961 |
| 816 | 2467984 |
| 817 | 2470355 |
| 818 | 2514991 |
| 819 | 2521464 |
| 820 | 2521489 |
| 821 | 2521518 |
| 822 | 2521567 |
| 823 | 2521691 |
| 824 | 2522386 |
| 825 | 2522737 |
| 826 | 2522793 |
| 827 | 2536837 |
| 828 | 2542177 |
| 829 | 2543728 |
| 830 | 2545772 |
| 831 | 2559365 |
| 832 | 2563835 |
| 833 | 2576125 |
| 834 | 2576602 |
| 835 | 2631940 |
| 836 | 2639484 |
| 837 | 2656100 |
| 838 | 2663029 |
| 839 | 2666164 |
| 840 | 2667661 |
| 841 | 2669452 |
| 842 | 2467919 |
| 843 | 2468373 |
| 844 | 2490802 |
| 845 | 2504679 |
| 846 | 2521222 |
| 847 | 2521363 |
| 848 | 2521796 |
| 849 | 2521834 |
| 850 | 2521915 |
| 851 | 2522104 |
| 852 | 2522154 |
| 853 | 2522182 |
| 854 | 2522203 |
| 855 | 2522206 |
| 856 | 2522281 |
| 857 | 2522407 |
| 858 | 2522425 |
| 859 | 2522442 |
| 860 | 2559542 |
| 861 | 2559545 |
| 862 | 2573977 |
| 863 | 2575020 |
| 864 | 2580413 |
| 865 | 2637523 |
| 866 | 2457794 |
| 867 | 2469440 |
| 868 | 2473513 |
| 869 | 2491086 |
| 870 | 2507738 |
| 871 | 2508455 |
| 872 | 2509123 |
| 873 | 2513438 |
| 874 | 2537130 |
| 875 | 2538891 |
| 876 | 2543551 |
| 877 | 2572576 |
| 878 | 2574337 |
| 879 | 2594510 |
| 880 | 2629314 |
| 881 | 2648018 |
| 882 | 2661751 |
| 883 | 2667610 |
| 884 | 2673751 |
| 885 | 2678007 |
| 886 | 2678102 |
| 887 | 2687982 |
| 888 | 2690184 |
| 889 | 2459261 |
| 890 | 2465701 |
| 891 | 2514575 |
| 892 | 2519363 |
| 893 | 2532928 |
| 894 | 2533241 |
| 895 | 2538913 |
| 896 | 2549543 |
| 897 | 2569141 |
| 898 | 2572823 |
| 899 | 2575976 |
| 900 | 2585154 |
| 901 | 2596236 |
| 902 | 2607759 |
| 903 | 2610312 |
| 904 | 2640391 |
| 905 | 2649136 |
| 906 | 2455999 |
| 907 | 2465682 |
| 908 | 2466642 |
| 909 | 2466653 |
| 910 | 2504285 |
| 911 | 2505201 |
| 912 | 2505276 |
| 913 | 2507560 |
| 914 | 2538578 |
| 915 | 2540758 |
| 916 | 2542506 |
| 917 | 2555427 |
| 918 | 2555730 |
| 919 | 2568376 |
| 920 | 2569010 |
| 921 | 2572872 |
| 922 | 2581241 |
| 923 | 2645074 |
| 924 | 2646301 |
| 925 | 2646388 |
| 926 | 2647115 |
| 927 | 2656014 |
| 928 | 2656747 |
| 929 | 2661136 |
| 930 | 2661147 |
| 931 | 2663748 |
| 932 | 2663835 |
| 933 | 2663976 |
| 934 | 2664154 |
| 935 | 2664591 |
| 936 | 2666832 |
| 937 | 2468303 |
| 938 | 2468910 |
| 939 | 2482513 |
| 940 | 2504662 |
| 941 | 2507918 |
| 942 | 2509419 |
| 943 | 2537144 |
| 944 | 2542963 |
| 945 | 2542984 |
| 946 | 2542995 |
| 947 | 2551320 |
| 948 | 2631652 |
| 949 | 2635245 |
| 950 | 2646115 |
| 951 | 2646276 |
| 952 | 2646297 |
| 953 | 2648615 |
| 954 | 2648639 |
| 955 | 2650571 |
| 956 | 2650644 |
| 957 | 2650648 |
| 958 | 2650674 |
| 959 | 2658716 |
| 960 | 2658738 |
| 961 | 2664916 |
| 962 | 2665107 |
| 963 | 2666087 |
| 964 | 2667598 |
| 965 | 2674905 |
| 966 | 2675031 |
| 967 | 2680785 |
| 968 | 2681038 |
| 969 | 2688428 |

[0626] TABLE 2 provides illustrative sequences of exemplary heterologous polypeptide modifications of effector protein(s) that are useful in the compositions, systems and methods described herein.

TABLE 2
SEQUENCES OF EXEMPLARY HETEROLOGOUS POLYPEPTIDE
MODIFICATIONS OF EFFECTOR PROTEIN(S)

| SEQ | | |
|---|---|---|
| ID | | |
| NO: | Description | Sequence* |
| | NLS | KR(K/R)R |
| | NLS | (P/R)XXKR(^{∧}D/E)(K/R) |
| 972 | NLS | KRX(W/F/Y)XXAF |
| | NLS | (R/P)XXKR(K/R)(^{∧}D/E) |
| 974 | NLS | LGKR(K/R)(W/F/Y) |
| | NLS | KRX₁₀K(K/R)(K/R) |
| 976 | EEP | GLFXALLXLLXSLWXLLLXA |
| | NLS | K(K/R)RK |
| | NLS | KRX₁₁K(K/R)(K/R) |
| | NLS | KRX₁₂K(K/R)(K/R) |
| | NLS | KRX₁₀K(K/R)X(K/R) |
| | NLS | KRX₁₁K(K/R)X(K/R) |
| | NLS | KRX₁₂K(K/R)X(K/R) |
| 983 | NLS | APKKKRKVGIHGVPAA |

*wherein X is independently any amino acid; and ^{∧}D/E is any naturally occurring amino acid except Asp or Glu

[0627] TABLE 3 provides illustrative repeat sequences for use in guide nucleic acids that are useful in the compositions, systems and methods described herein.

TABLE 3
EXEMPLARY REPEAT SEQUENCES FOR USE IN GUIDE NUCLEIC ACIDS

| Effector | Effector | Repeat | |
|---|---|---|---|
| Protein | Partner | Sequence | |
| SEQ ID NO: | SEQ ID NO: | SEQ ID NO: | Repeat Sequence (5′→3′), shown as RNA |
| 42 | 938 | 985 | GUCGCGCGCGACUCCCCGAUGUGAAGGGGACUGAAAC |
| 300 | 950 | 986 | GAUUGUAAAGAACAACUUGGCUAU |
| 308 | 925 | 987 | UGCUUGCAAAAAUGGACGCG |
| 16 | 549 | 988 | CGGAUCAUCCCCGCGCGGGGGGGAACAC |
| 82 | 584 | 989 | GUCCGCCCCGCGCAUGCGGGGAUCGACC |
| 280 | 593 | 990 | GGUUCCUCCGCGUGCGCGGAGAUAGACC |
| 353 | 566 | 991 | GGCUUCAUCCCCGCUGAGCGGGGCCACC |
| 390 | 572 | 992 | CGGUUCAUCCCCGCGCACGCGGGGAACAC |
| 198 | 636 | 993 | GACUGAAUCACAGACCUGAAUAAGAAGGGAUUAAGAC |
| 235 | 649 | 994 | UGCGUUACAAGAUCUCUUAACGGUUCAACAU |
| 254 | 735 | 995 | GCUUCAAUGGGGCCGCGCUUUCGGAAGCGCGGAAAC |
| 174 | 753 | 996 | AAUUUCAAUCCACGCCCCCCGCGAGGGGAGCGAC |
| 40 | 791 | 997 | GUCGCUCCCCGCGUGGGGGCGUGGAUUGAAAC |
| 88 | 796 | 998 | GUUUUCCCCACACGCGUGGGGGUGGACCG |
| 106 | 748 | 999 | GUUUUCCCCGCGAGUGCGGGGGUGAGGCG |
| 222 | 802 | 1000 | AUCGUCCCCACGGGCGUGGGGGUGAACCG |
| 124 | 855 | 1001 | GUUUCAACCCUCACCCAACCUCAAGGCCGGGUGCAAC |
| 125 | 856 | 1002 | GUUUCAAUCUCAACCGAGAUGCCAGGCCCCUGGCGAC |
| 173 | 830 | 1003 | UUUCAAUCUCUGCUGAGCUUCCCUGACCACAUAGAC |
| 188 | 831 | 1004 | GUUUCAAUCUCAGACGAGAUGCCAGGCCGCUUGAGCC |
| 394 | 839 | 1005 | GUUUCAAUUCUCAAUGCCCCCGAGAAGGCAUUGCUAC |
| 51 | 868 | 1006 | UUUCCGGAGCAUACCCGUUCA |
| 252 | 903 | 1007 | AUUUCAAUUCUACUUAGUUCUAUUAAUAC |
| 329 | 905 | 1008 | GUUGUAUCUUAUCAAACAUCUACAUCAAACCACAAC |

[0628] TABLE 4 provides illustrative target nucleic acids that are useful in the compositions, systems and methods described herein.

TABLE 4
EXEMPLARY TARGET NUCLEIC ACIDS
Exemplary targets

AAVS1, ABCA4, ABCB11, ABCC8, ABCD1, ABCG5, ABCG8, ACAD9, ACADM, ACADVL, ACAT1, ACTA1, ACOX1, ACSF3, ADA,
ADAMTS2, ADGRG1, AGA, AGL, AGPS, AGXT, AHI1, AIRE, ALDH3A2, ALDOB, ALG6, ALK, ALKBH5, ALMS1, ALPL, AMRC9, AMT,
ANAPC10, ANAPC11, ANGPTL3, ANGPTL4, ANGPTL7, APC, Apo(a), APOCIII, APOE, APOEε4, APOL1, APP, AQP2, AR, ARFRP1, ARG1,
ARH, ARL13B, ARL6, ARSA, ARSB, ASL, ASNS, ASPA, ASS1, ATM, ATP6V1B1, ATP7A, ATP7B, ATRX, ATXN1, ATXN10, ATXN2, ATXN3,
ATXN7, ATXN8OS, AXIN1, AXIN2, B2M, BACE-1, BAK1, BAP1, BARD1, BAX2, BBS1, BBS10, BBS12, BBS2, BCKDHA, BCKDHB, BCL2L2,
BCS1L, BEST1, Betaglobin gene, BLM, BMPR1A, BRAF, BRAFV600E, BRCA1, BRCA2, BRIP1, BSND, C9orf72, CA4, CACNA1A, CAH1,
CAPN3, CASR, CBS, CCNB1 CC2D2A, CCR5, CD1, CD2, CD3, CD3D, CD3Z, CD4, CD5, CD6, CD7, CD8A, CD8B, CD9, CD14, CD18,
CD19, CD21, CD22, CD23, CD27, CD28, CD30, CD33, CD34, CD36, CD38, CD40, CD40L, CD44, CD46, CD47, CD48, CD52, CD55,
CD57, CD58, CD59, CD68, CD69, CD72, CD73, CD74, CD79A, CD80, CD81, CD83, CD84, CD86, CD90, CD93, CD96, CD99, CD100,
CD123, CD160, CD163, CD164, CD164L2, CD166, CD200, CD204, CD207, CD209, CD226, CD244, CD247, CD274, CD276, CD300,
CD320, CDC73, CDH1, CDH23, CDK11, CDK4, CDKN1A, CDKN1B, CDKN1C, CDKN2A, CDKN2B, CEBPA, CELA3B, CEP 290, CERKL,
CFB, CFTR, CHCHD10, CHEK2, CHM, CHRNE, CIDEB, CIITA, CLN3, CLN5, CLN6, CLN8, CLRN1, CLTA, CMT1A, CNBP, CNGB1,
CNGB3, COL1A1, COL1A2, COL27A1, COL4A3, COL4A4, COL4A5, COL6A1, COL6A2, COL6A3, COL7A1, CPSI, CPT1A, CPT2, CRB1,
CREBBP, CRX, CRYAA, CTNNA1, CTNNB1, CTNND2, CTNS, CTSK, CXCL12, CYBA, CYBB, CYP11B1, CYP11B2, CYP17A1, CYP19A1,
CYP21A2, CYP27A1, DBT, DCC, DCLREIC, DERL2, DFNA36, DFNB31, DGAT2, DHCR7, DHDDS, DICER1, DIS3L2, DLD, DMD, DMPK,
DNAH5, DNAI1, DNAI2, DNM2, DNMT1, DPC4, DUX4, DYSF, EDA, EDN3, EDNRB, EGFR, EIF2B5, EMC2, EMC3, EMD, EMX1, EN1,
EPCAM, ERCC6, ERCC8, ESCO2, ETFA, ETFDH, ETHE1, EVC, EVC2, EYS, F5, F9, FXI, FAH, FAM161A, FANCA, FANCB, FANCC,
FANCD1, FANCD2, FANCE, FANCF, FANCG, FANCI, FANCJ, FANCL, FANCM, FANCN, FANCP, FANCS, FBN1, FGF14, FGFR2,
FGFR3, FGA, FGB, FGG, FH, FHL1, FIX, FKRP, FKTN, FLCN, FMR1, FOXP 3, FSCN2, FSHD1, FUS, FUT8, FVIII, FXII, FXN, G6PC,
GAA, GALC, GALK1, GALT, GAMT, GATA2, GATA-4, GBA, GBE1, GCDH, GCGR, GDNF, GFAP, GFM1, GHR, GJB1, GJB2, GLA, GLB1,
GLDC, GLE1, GNE, GNPTAB, GNPTG, GNS, GPAM, GPC3, GPR98, GREM1, GRHPR, GRIN2B, H2AFX, H2AX, HADHA, HAX1, HBA1,
HBA2, HBB, HBV cccDNA, HER2, HEXA, HEXB, HFE, HGSNAT, HLCS, HMGCL, HAO1, HOGA1, HOXB13, HPRPF3, HPRT1, HPS1,
HPS3, HRAS, HRD1, HSD3B2, HSD17B4, HSD17B13, HTT, HUS1, HYAL1, HYLS1, IDS, IDUA, IFITM5, IFN, IFN-γ, IKBKAP, IL2RG, IL7R,
IMPDH1, INPP5E, IRF4, ITGB2, ITPR1, IVD, JAG1, JAK1, JAK3, KCNC3, KCND3, KCNJ11, KLKB1, KLHL7, KRAS, LAMA1, LAMA2,
LAMA3, LAMB3, LAMC2, LCA5, LDHA, LDLR, LDLRAP1, LHX3, LIFR, LIPA, LMNA, LMOD3, LOR, LOXHD1, LPA, LPL, LRAT, LRP6,
LRPPRC, LRRK2, MADR2, MAN2B1, MAPT, MARC1, MAX, MCM6, MCOLN1, MECP2, MED17, MEFV, MEN1, MERTK, MESP2, MET,
METex14, MFN2, MFSD8, MIA3, MITF, MKL2, MKS1, MLC1, MLH1, MLH3, MMAA, MMAB, MMACHC, MMADHC, MMD, MPI, MPL,
MPV17, MSH2, MSH3, MSH6, MTHFD1L, MTHFR, MTM1, MTRR, MTTP, MUT, MUTYH, MYC, MYH7, MYO7A, MYOC, NAGLU, NAGS,
NAV1.7, NBN, NDRG1, NDUFAF5, NDUFS6, NEB, NF1, NF2, NKX2-5, NOG, NOTCH1, NOTCH2, NPC1, NPC2, NPHP1, NPHS1, NPHS2,
NRAS, NR2E3, NTHL1, NTRK, NTRK1, OAT, OCT4, OFD1, OPA3, OTC, PAH, PALB2, PAQR8, PAX3, PC, PCCA, PCCB, PCDH15, PCSK9,
PD1, PDCD1, PDE6B, PDGFRA, PDHA1, PDHB, PEX1, PEX10, PEX12, PEX13, PEX14, PEX16, PEX19, PEX2, PEX26, PEX3, PEX5,
PEX6, PEX7, PFKM, PHGDH, PHOX2B, PKD1, PKD2, PKHD1, PKK, PLEKHG4, PMM2, PMP22, PMS1, PMS2, PNPLA3, POLD1, POLE,
POMGNT1, POT1, POU5F1, PPM1A, PPP2R2B, PPT1, PRCD, PRKAG2, PRKAR1A, PRKCG, PRNP, PROM1, PROP1, PRPF31, PRPF8,
PRPH2, PRPS1, PSAP, PSD3, PSD95, PSEN1, PSEN2, PSRC1, PTCH1, PTEN, PTS, PUS1, PYGM, RAB23, RAD50, RAD51C, RAD51D,
RAG1, RAG2, RAPSN, RARS2, RB1, RDH12, RECQL4, RET, RHO, RICTOR, RMRP, ROS1, RP1, RP2, RPE65, RPGR, RPGRIP1L, RPL32P3,
RPTOR, RS1, RTCA, RTEL1, RUNX1, SACS, SAMHD1, SCN1A, SCN2A, SDHA, SDHAF2, SDHB, SDHC, SDHD, SEL1L, SEPSECS,
SERPINA1, SERPINC1, SERPING1, SGCA, SGCB, SGCG, SGSH, SIRT1, SLC12A3, SLC12A6, SLC17A5, SLC22A5, SLC25A13, SLC25A15,
SLC26A2, SLC26A4, SLC35A3, SLC35B4, SLC37A4, SLC39A4, SLC4A11, SLC6A8, SLC7A7, SMAD3, SMAD4, SMARCA4, SMARCAL1,
SMARCB1, SMARCE1, SMN1, SMPD1, SNAI2, SNCA, SNRNP200, SOD1, SOX10, SPARA7, SPTBN2, STAR, STAT3, STK11, SUFU, SUMF1,
SYNE1, SYNE2, SYS1, TARDBP, TAT, TBK1, TBP, TCF4, TCIRG1, TCTN3, TECPR2, TERC, TERT, TFR2, TGFBR2, TGM1, TH, TLE3,
TMEM127, TMEM138, TMEM216, TMEM43, TMEM67, TMPRSS6, TNNI2, TNNT1, TNNT3, TOP1, TOPORS, TP53, TPM2, TPM3, TPP1,
TRAC, TRMU, TSC1, TSC2, TSFM, TSPAN14, TTBK2, TTC8, TTPA, TTR, TULP1, TYMP, UBE2G2, UBE2J1, UBE3A, USH1C, USH1G,
USH2A, VEGF, VHL, VPS13A, VPS13B, VPS35, VPS45, VRK1, VSX2, VWF, WAS, WDR19, WDR48, WNT10A, WRN, WS2B, WS2C, WT1,
XPA, XPC, XPF, XRCC3, YAP1, ZAC1, ZEB1, ZFYVE26, and ZNF423

[0629] TABLE 5 provides illustrative diseases and syndromes for compositions, systems and methods described herein.

TABLE 5
DISEASES AND SYNDROMES
Exemplary Diseases and Syndromes

11-hydroxylase deficiency; 17, 20-desmolase deficiency; 17-hydroxylase deficiency; 3-hydroxyisobutyrate aciduria; 3-hydroxysteroid
dehydrogenase deficiency; 46, XY gonadal dysgenesis; AAA syndrome; ABCA3 deficiency; ABCC8-associated hyperinsulinism;
aceruloplasminemia; acromegaly; achondrogenesis type 2; acral peeling skin syndrome; acrodermatitis enteropathica; acute bacterial infection;
adrenocortical micronodular hyperplasia; adrenoleukodystrophies; adrenomyeloneuropathies; Aicardi-Goutieres syndrome; AIDS; Alagille
disease (also called Alagille Syndrome); Alexander Disease; Alpers syndrome; alpha-1 antitrypsin deficiency (AATD); alpha-mannosidosis;
Alstrom syndrome; Alzheimer's disease; amebic dysentery; amelogenesis imperfecta; amish type microcephaly; amyotrophic lateral sclerosis
(ALS); anaplastic large cell lymphoma; anauxetic dysplasia; androgen insensitivity syndrome; angiopathic thrombosis; antiphospholipid
syndrome; Antley-Bixler syndrome; APECED; Apert syndrome; aplasia of lacrimal and salivary glands; arginase-1 deficiency; argininosuccinic
aciduria; argininemia; arrhythmogenic right ventricular dysplasia; Arts syndrome; ARVD2; arylsulfatase deficiency type metachromatic
leukodystrophy; ataxia telangiectasia; atherosclerotic cardiovascular disease; autoimmune lymphoproliferative syndrome; autoimmune
polyglandular syndrome type 1; autosomal dominant anhidrotic ectodermal dysplasia; autosomal dominant deafness; autosomal dominant
polycystic kidney disease; autosomal recessive microtia; autosomal recessive renal glucosuria; autosomal visceral heterotaxy; babesiosis;
bacterial vaginosis; balantidial dysentery; Bardet-Biedl syndrome; Bartter syndrome; basal cell nevus syndrome; Batten disease; benign
recurrent intrahepatic cholestasis; beta-mannosidosis; β-thalassemia; Bethlem myopathy; Blackfan-Diamond anemia; bleeding disorder
(coagulation); blepharophimosis; Byler disease; C syndrome; CADASIL; calcific aortic stenosis; calcification of joints and arteries; carbamoyl
phosphate synthetase I deficiency; carcinoid syndrome diarrhea; cardiofaciocutaneous syndrome; cardiovascular disease (CVD); Carney triad;
carnitine palmitoyltransferase deficiencies; cartilage-hair hypoplasia; cblC type of combined methylmalonic aciduria; CD18 deficiency; CD3Z-
associated primary T-cell immunodeficiency; CD40L deficiency; CDAGS syndrome; CDG1A; CDG1B; CDG1M; CDG2C; CEDN1K
syndrome; central core disease; centronuclear myopathy; cerebral capillary malformation; cerebrooculofacioskeletal syndrome type 4;
cerebrooculogacioskeletal syndrome; cerebrotendinous xanthomatosis; Chagas' Disease; Charcot Marie Tooth Disesase; chemotherapy;
cherubism; CHILD syndrome; chronic granulomatous disease; chronic recurrent multifocal osteomyelitis; cirrhosis; citrin deficiency;
citrullinemia type I; citrullinemia type II; classic hemochromatosis; CNPPB syndrome; cobalamin C disease; Cockayne syndrome; coenzyme
Q10 deficiency; Coffin-Lowry syndrome; Cohen syndrome; combined deficiency of coagulation factors V; common variable immune
deficiency 3; complement hyperactivation; complete androgen insentivity; cone rod dystrophies; conformational diseases; congenital adrenal
hyperplasia (CAH); congenital bile acid synthesis defect type 1; congenital bile acid synthesis defect type 2; congenital defect in bile acid
synthesis type; congenital erythropoietic porphyria; congenital generalized osteosclerosis; congenital muscular dystrophy 1A (MDC1A);
Cornelia de Lange syndrome; coronary heart disease; Cousin syndrome; Cowden disease; COX deficiency; Cri du chat syndrome; Crigler-
Najjar disease; Crigler-Najjar syndrome type 1; Crisponi syndrome; Crouzon syndrome; Currarino syndrome; Curth-Macklin type ichthyosis
hystrix; cutaneous T-cell lymphoma; cutis laxa; cystic fibrosis; cystinosis; d-2-hydroxyglutaric aciduria; DDP syndrome; Dejerine-Sottas
disease; dementia; Denys-Drash syndrome; Dercum disease; desmin cardiomyopathy; desmin myopathy; DGUOK-associated mitochondrial
DNA depletion; diabetes Type I; diabetes Type II; disorders of glutamate metabolism; distal spinal muscular atrophy type 5; DNA repair
diseases; dominant optic atrophy; Doyne honeycomb retinal dystrophy; Dravet Syndrome; Duchenne muscular dystrophy; dyskeratosis
congenita; Ehlers-Danlos syndrome type 4; Ehlers-Danlos syndromes; Elejalde disease; Ellis-van Creveld disease; Emery-Dreifuss muscular
dystrophies; encephalomyopathic mtDNA depletion syndrome; encephalitis; enzymatic diseases; EPCAM-associated congenital tufting
enteropathy; epidermolysis bullosa with pyloric atresia; epilepsy; fabry disease; facioscapulohumeral muscular dystrophy; Factor V Leiden
thrombophilia; Faisalabad histiocytosis; familial atypical mycobacteriosis; familial capillary malformation-arteriovenous; Familial Creutzfeld-
Jakob disease; familial esophageal achalasia; familial glomuvenous malformation; familial hemophagocytic lymphohistiocytosis; familial
mediterranean fever; familial megacalyces; familial schwannomatosis; familial spina bifida; familial splenic asplenia/hypoplasia; familial
thrombotic thrombocytopenia purpura; Fanconi disease (Fanconi anemia); Feingold syndrome; FENIB; fibrodysplasia ossificans progressiva;
FKTN; Fragile X syndrome; Francois-Neetens fleck corneal dystrophy; Frasier syndrome; Friedreich's ataxia; FTDP-17; Fuchs corneal
dystrophy; fucosidosis; G6PD deficiency; galactosialidosis; Galloway syndrome; Gardner syndrome; Gaucher disease; Gitelman syndrome;
glaucoma; GLUT1 deficiency; GM2- Gangliosidoses (e.g., Tay Sachs Disease, Sandhoff Disease) glycogen storage disease type 1b; glycogen
storage disease type 2; glycogen storage disease type 3; glycogen storage disease type 4; glycogen storage disease type 9a; glycogen storage
diseases; GM1-gangliosidosis; Greenberg syndrome; Greig cephalopolysyndactyly syndrome; hair genetic diseases; hairy cell leukemia;
HANAC syndrome; harlequin type ichtyosis congenita; HDR syndrome; hearing loss; heart failure; hemochromatosis type 3; hemochromatosis
type 4; hemolytic anemia; hemolytic uremic syndrome; hemophilia A; hemophilia B; hepatitis C infection; hereditary angioedema type 3;
hereditary angioedemas; hereditary hemorrhagic telangiectasia; hereditary hypofibrinogenemia; hereditary intraosseous vascular malformation;
hereditary leiomyomatosis and renal cell cancer; hereditary neuralgic amyotrophy; hereditary orotic aciduria; hereditary sensory and autonomic
neuropathy type; Hermansky-Pudlak disease; HHH syndrome; HHT2; hidrotic ectodermal dysplasia type 1; hidrotic ectodermal dysplasias;
histiocytic sarcoma; HNF4A-associated hyperinsulinism; HNPCC; homozygous familial hypercholesterolemia; hormone refractory prostate
cancer; human immunodeficiency with microcephaly; Human monkeypox (MPX); human papilloma virus (HPV) infection; Huntington's
disease; hyper-IgD syndrome; hyperinsulinism-hyperammonemia syndrome; hypercholesterolemia; hypertension; hypertrophy of the retinal
pigment epithelium; hypochondrogenesis; hypohidrotic ectodermal dysplasia; hypotension; ICF syndrome; idiopathic congenital intestinal
pseudo-obstruction; immunodeficiency 13; immunodeficiency 17; immunodeficiency 25; immunodeficiency with hyper-IgM type 1;
immunodeficiency with hyper-IgM type 3; immunodeficiency with hyper-IgM type 4; immunodeficiency with hyper-IgM type 5;
immunoglobulin alpha deficiency; inborn errors of thyroid metabolism; infantile myofibromatosis; infantile visceral myopathy; infantile X-
linked spinal muscular atrophy; influenza A; influenza B; insulin resistance; intradialytic hypotension; intrahepatic cholestasis of pregnancy;
invasive aspergillosis; invasive mucormycosis; IPEX syndrome; IRAK4 deficiency; isolated congenital asplenia; Jeune syndrome; Johanson-
Blizzard syndrome; Joubert syndrome; JP-HHT syndrome; juvenile hemochromatosis; juvenile hyalin fibromatosis; juvenile nephronophthisis;
Kabuki mask syndrome; Kallmann syndromes; Kartagener syndrome; KCNJ11-associated hyperinsulinism; Kearns-Sayre syndrome; Kostmann
disease; Kozlowski type of spondylometaphyseal dysplasia; Krabbe disease; LADD syndrome; late infantile-onset neuronal ceroid
lipofuscinosis; LCK deficiency; LDHCP syndrome; Leber Congenital Amaurosis Teyp 10; Legius syndrome; Leigh syndrome; lethal congenital
contracture syndrome 2; lethal congenital contracture syndromes; lethal contractural syndrome type 3; lethal neonatal CPT deficiency type 2;
lethal osteosclerotic bone dysplasia; leukocyte adhesion deficiency; Li Fraumeni syndrome; LIG4 syndrome; limb girdle muscular dystrophies
(LGMD1B, LGMD2A, LGMD2B); lipodystrophy; lissencephaly type 1; lissencephaly type 3; Loeys-Dietz syndrome; low phospholipid-
associated cholelithiasis; Lynch Syndrome; lysinuric protein intolerance; a lysosomal storage disease (e.g., Hunter syndrome, Hurler syndrome);
macular dystrophy; Maffucci syndrome; Majeed syndrome; malaria; mannose-binding protein deficiency; mantle cell lymphoma; Marfan
disease; Marshall syndrome; MASA syndrome; mastocytosis; MCAD deficiency; McCune-Albright syndrome; MCKD2; Meckel syndrome;
MECP2 Duplication Syndrome; Meesmann corneal dystrophy; megacystis-microcolon-intestinal hypoperistalsis; megaloblastic anemia type 1;
MEHMO; MELAS; Melnick-Needles syndrome; MEN2s; meningitis; Menkes disease; metachromatic leukodystrophies; methymalonic
acidemia due to transcobalamin receptor defect; methylmalonic acidurias; methylvalonic aciduria; microcoria-congenital nephrosis syndrome;
microvillous atrophy; migraine; mitochondrial neurogastrointestinal encephalomyopathy; monilethrix; monosomy X; mosaic trisomy 9
syndrome; Mowat-Wilson syndrome; mucolipidosis type 2; mucolipidosis type Ma; mucolipidosis type IV; mucopolysaccharidoses;
mucopolysaccharidosis type 3A; mucopolysaccharidosis type 3C; mucopolysaccharidosis type 4B; multiminicore disease; multiple acyl-CoA
dehydrogenation deficiency; multiple cutaneous and mucosal venous malformations; multiple endocrine neoplasia type 1; multiple myeloma;
multiple sclerosis; multiple sulfatase deficiency; mycosis fungoides; myotonic dystrophy; NAIC; nail-patella syndrome; nemaline myopathies;
neonatal diabetes mellitus; neonatal surfactant deficiency; nephronophtisis; Netherton disease; neurofibromatoses; neurofibromatosis type 1;
Niemann-Pick disease type A; Niemann-Pick disease type B; Niemann-Pick disease type C; NKX2E; non-alcoholic fatty liver disease
(NAFLD); non-alcoholic steatohepatitis (NASH); Noonan syndrome; North American Indian childhood cirrhosis; NROB1 duplication-
associated DSD; ocular genetic diseases; oculo-auricular syndrome; OLEDAID; oligomeganephronia; oligomeganephronic renal hypolasia;
Ollier disease; Opitz-Kaveggia syndrome; ornithine transcarbamylase deficiency (OTCD); orofaciodigital syndrome type 1; orofaciodigital
syndrome type 2; osseous Paget disease; osteogenesis imperfecta; otopalatodigital syndrome type 2; orthostatic hypotension; overactive bladder;
OXPHOS diseases; pain; palmoplantar hyperkeratosis; panlobar nephroblastomatosis; Parkes-Weber syndrome; Parkinson's disease; partial
deletion of 21q22.2-q22.3; Pearson syndrome; Pelizaeus-Merzbacher disease; Pendred syndrome; pentalogy of Cantrell; peroxisomal acyl-CoA-
oxidase deficiency; Peutz-Jeghers syndrome; Pfeiffer syndrome; Pierson syndrome; pigmented nodular adrenocortical disease; pipecolic
acidemia; Pitt-Hopkins syndrome; plasmalogens deficiency; platelet glycoprotein IV deficiency; pleuropulmonary blastoma and cystic
nephroma; pneumonia; polycystic kidney disease; polycystic ovarian disease; polycystic lipomembranous osteodysplasia; Pompe disease;
including infantile onset Pompe disease (IOPD) and late onset Pompe disease (LOPD); porphyrias; post-herpetic neuralgia; PRKAG2 cardiac
syndrome; premature ovarian failure; primary erythermalgia; primary hemochromatoses; primary hyperoxaluria; progressive familial
intrahepatic cholestasis; propionic acidemia; prostate cancer; protein-losing enteropathy; pulmonary arterial hypertension; pyruvate
decarboxylase deficiency; RAPADILINO syndrome; renal cystinosis; restless leg syndrome; retinitis pigmentosa; Rett Syndrome; rhabdoid
tumor predisposition syndrome; Rieger syndrome; ring chromosome 4; Roberts syndrome; Robinow-Sorauf syndrome; Rothmund-Thomson
syndrome; severe combined immunodeficiency disorder (SCID); Saethre-Chotzen syndrome; Sandhoff disease; SC phocomelia syndrome;
SCAS; Schinzel phocomelia syndrome; schizophrenia; severe hypertriglyceridemia; short rib-polydactyly syndrome type 1; short rib-
polydactyly syndrome type 4; short-rib polydactyly syndrome type 2; short-rib polydactyly syndrome type 3; Shwachman disease; Shwachman-
Diamond disease; sickle cell anemia; Silver-Russell syndrome; Simpson-Golabi-Behmel syndrome; skin infection; Smith-Lemli-Opitz
syndrome; SPG7-associated hereditary spastic paraplegia; spherocytosis; spinocerebellar ataxia; spinal muscular atrophy; split-hand/foot
malformation with long bone deficiencies; spondylocostal dysostosis; sporadic amyotrophic lateral sclerosis; sporadic visceral myopathy with
inclusion bodies; storage diseases; Stargardt macular dystrophy; STRA6-associated syndrome; stroke; subependymal glioma; tardive
dyskinesia; Tay-Sachs disease; thanatophoric dysplasia; thromboembolism; thrombosis; thrombophilia due to antithrombin III deficiency;
thyroid metabolism diseases; Tourette syndrome; transcarbamylase deficiency; transthyretin-associated amyloidosis; trisomy 13; trisomy 22;
trisomy 2p syndrome; tuberous sclerosis; tufting enteropathy; ullrich congenital muscular dystrophy (UCMD); urea cycle diseases; Usher
Syndrome; Van Den Ende-Gupta syndrome; Van der Woude syndrome; variegated mosaic aneuploidy syndrome; VLCAD deficiency; von
Hippel-Lindau disease; von Willebrand disease; Waardenburg syndrome; WAGR syndrome; Walker-Warburg syndrome; Werner syndrome;
Wilson's disease; Wiskott-Aldrich Syndrome; Wolcott-Rallison syndrome; Wolfram syndrome; X-linked agammaglobulinemia; X-linked
chronic idiopathic intestinal pseudo-obstruction; X-linked cleft palate with ankyloglossia; X-linked dominant chondrodysplasia punctata; X-
linked ectodermal dysplasia; X-linked Emery-Dreifuss muscular dystrophy; X-linked lissencephaly; X-linked lymphoproliferative disease; X-
linked visceral heterotaxy; xanthinuria type 1; xanthinuria type 2; xeroderma pigmentosum; XPV; and Zellweger disease.

### EXAMPLES

[0630] The following examples are included for illustrative purposes only and are not intended to limit the scope of the invention.

### Example 1: Metagenomic Identification of Effector Proteins and Effector Partners

[0631] Genes encoding effector proteins and effector partners were identified by sequence homology and structural analyses of potential CRISPR arrays and cognate proteins. Two groups of proteins emerged: a first group of proteins were identified close to the CRISPR arrays and a second group of proteins were identified close to the first group of proteins. All proteins were sorted by structural similarity into clusters. Through BLAST and HEIPred analysis, the identified proteins were found to be structurally similar to the IS family of transposases. Specifically, the first group of proteins were structurally similar to Ist21 transposases of the IS family of transposases (e.g., as encoded by istA) and identified as effector proteins of interest, and the second group of proteins were structurally similar to the helper proteins (e.g., as encoded by istB) of the IS family of transposases. Of the second group of proteins, two-subgroups of proteins emerged: a first subgroup that was generally found downstream of and typically shared an overlapping ORF with the first group of proteins; and a second subgroup that was found in varying locations. When a protein from the second subgroup was found downstream of the first subgroup, it was typically found to be ˜150 bp away and may have some overlapping ORFs. There were some exceptions, for example, when a protein from the second subgroup was found far downstream, such a protein was found to be about −3.5 kb away. When a protein from the second subgroup was found upstream, the ORF overlapped with the first group of proteins about half the time, otherwise the proteins were found to be within 50 bp of one another. Furthermore, if the ORF of a first subgroup does not overlap with the first group, then the two proteins were found within 50 bp of each other.

[0632] Without being bound by theory, it is contemplated that the identified effector proteins function as RNA-guided transposases. Also, without being bound by theory, it is contemplated that the second group of proteins, like the IS helper proteins, are also helper or partner proteins for the identified effector proteins of interest.

[0633] Effector Protein Library: In total, 454 effector proteins (SEQ ID NO: 1 to SEQ ID NO: 454), as set forth in TABLE 1 were selected as candidates.

[0634] Effector Partner Protein Library: In total, 515 effector partners (SEQ ID NO: 455 to SEQ ID NO: 969), as set forth in TABLE 1.1 were selected as candidates.

[0635] TABLE 6 describes effector protein and partner combinations identified in the above-described metagenomic analysis.

TABLE 6
COMPOSITIONS COMPRISING EFFECTOR PROTEIN AND
EFFECTOR PARTNER EXEMPLARY COMBINATIONS

| | Effector | | Effector | | Effector | | Location |
|---|---|---|---|---|---|---|---|
| | Protein | | Partner 1 | Effector | Partner 2 | Effector | Relative to |
| | (SEQ ID | Effector | (SEQ ID | Partner 1 | (SEQ ID | Partner 2 | Effector |
| # | NO) | Protein ID | NO) | ID | NO) | ID | Partner 1 |
| 1 | 1 | 2456001 | 906 | 2455999 | 514 | 2456002 | upstream |
| 2 | 2 | 2456475 | 595 | 2456476 | | | |
| 3 | 3 | 2456558 | 742 | 2456555 | | | |
| 4 | 4 | 2457490 | 596 | 2457488 | | | |
| 5 | 5 | 2457658 | 597 | 2457659 | | | |
| 6 | 6 | 2457689 | 598 | 2457687 | | | |
| 7 | 7 | 2457793 | 866 | 2457794 | | | |
| 8 | 8 | 2457935 | 715 | 2457936 | | | |
| 9 | 9 | 2458067 | 743 | 2458064 | | | |
| 10 | 10 | 2459252 | 889 | 2459261 | | | |
| 11 | 11 | 2460727 | 599 | 2460728 | | | |
| 12 | 12 | 2460813 | 744 | 2460811 | | | |
| 13 | 13 | 2460841 | 789 | 2460843 | | | |
| 14 | 14 | 2460904 | 790 | 2460905 | | | |
| 15 | 15 | 2460927 | 716 | 2460928 | | | |
| 16 | 16 | 2460977 | 549 | 2460978 | | | |
| 17 | 17 | 2462434 | 745 | 2462435 | | | |
| 18 | 18 | 2462454 | 550 | 2462455 | | | |
| 19 | 19 | 2463018 | 551 | 2463019 | | | |
| 20 | 20 | 2463119 | 494 | 2463120 | | | |
| 21 | 21 | 2464186 | 455 | 2464187 | | | |
| 22 | 22 | 2464978 | 717 | 2464976 | | | |
| 23 | 23 | 2465492 | 600 | 2465490 | | | |
| 24 | 24 | 2465502 | 601 | 2465500 | | | |
| 25 | 25 | 2465535 | 602 | 2465533 | | | |
| 26 | 26 | 2465684 | 907 | 2465682 | 515 | 2465685 | upstream |
| 27 | 27 | 2465703 | 890 | 2465701 | | | |
| 28 | 28 | 2466615 | 814 | 2466613 | | | |
| 29 | 29 | 2466640 | 908 | 2466642 | 516 | 2466638 | upstream |
| 30 | 30 | 2466645 | 456 | 2466643 | | | |
| 31 | 31 | 2466655 | 909 | 2466653 | 517 | 2466656 | upstream |
| 32 | 32 | 2466697 | | 2466695 | 518 | 2466698 | upstream |
| 33 | 33 | 2466980 | 583 | 2466978 | | | |
| 34 | 34 | 2467447 | 718 | 2467448 | | | |
| 35 | 35 | 2467918 | 842 | 2467919 | | | |
| 36 | 36 | 2467960 | 815 | 2467961 | | | |
| 37 | 37 | 2467986 | 816 | 2467984 | | | |
| 38 | 38 | 2468305 | 937 | 2468303 | 495 | 2468301 | downstream |
| 39 | 39 | 2468372 | 843 | 2468373 | | | |
| 40 | 40 | 2468693 | 791 | 2468691 | | | |
| 41 | 41 | 2468823 | 496 | 2468820 | | | |
| 42 | 42 | 2468912 | 938 | 2468910 | 497 | 2468908 | downstream |
| 43 | 43 | 2468988 | 498 | 2468985 | | | |
| 44 | 44 | 2469268 | 603 | 2469266 | | | |
| 45 | 45 | 2469304 | 604 | 2469302 | | | |
| 46 | 46 | 2469439 | 867 | 2469440 | | | |
| 47 | 47 | 2469808 | 719 | 2469809 | | | |
| 48 | 48 | 2469819 | 605 | 2469820 | | | |
| 49 | 49 | 2469824 | 720 | 2469822 | | | |
| 50 | 50 | 2470354 | 817 | 2470355 | | | |
| 51 | 51 | 2473512 | 868 | 2473513 | | | |
| 52 | 52 | 2482511 | 939 | 2482513 | 457 | 2482514 | downstream |
| 53 | 53 | 2483526 | 792 | 2483527 | | | |
| 54 | 54 | 2483741 | 606 | 2483742 | | | |
| 55 | 55 | 2489259 | 607 | 2489257 | | | |
| 56 | 56 | 2490524 | 608 | 2490525 | | | |
| 57 | 57 | 2490801 | 844 | 2490802 | | | |
| 58 | 58 | 2490995 | 609 | 2490993 | | | |
| 59 | 59 | 2491088 | 869 | 2491086 | | | |
| 60 | 60 | 2504283 | 910 | 2504285 | 519 | 2504281 | upstream |
| 61 | 61 | 2504313 | 746 | 2504310 | | | |
| 62 | 62 | 2504384 | 520 | 2504385 | | | |
| 63 | 63 | 2504398 | 610 | 2504396 | | | |
| 64 | 64 | 2504480 | 793 | 2504481 | | | |
| 65 | 65 | 2504486 | 794 | 2504484 | | | |
| 66 | 66 | 2504537 | 458 | 2504538 | | | |
| 67 | 67 | 2504664 | 940 | 2504662 | 499 | 2504660 | downstream |
| 68 | 68 | 2504681 | 845 | 2504679 | | | |
| 69 | 69 | 2504885 | 611 | 2504886 | | | |
| 70 | 70 | 2505104 | 612 | 2505102 | | | |
| 71 | 71 | 2505192 | 459 | 2505190 | | | |
| 72 | 72 | 2505203 | 911 | 2505201 | 521 | 2505204 | upstream |
| 73 | 73 | 2505234 | 613 | 2505235 | | | |
| 74 | 74 | 2505278 | 912 | 2505276 | 541 | 2505279 | upstream |
| 75 | 75 | 2505666 | 721 | 2505667 | | | |
| 76 | 76 | 2505670 | 614 | 2505668 | | | |
| 77 | 77 | 2505886 | 722 | 2505887 | | | |
| 78 | 78 | 2505958 | 615 | 2505959 | | | |
| 79 | 79 | 2506634 | 616 | 2506635 | | | |
| 80 | 80 | 2506662 | 723 | 2506660 | | | |
| 81 | 81 | 2506867 | 747 | 2506868 | | | |
| 82 | 82 | 2507107 | 584 | 2507105 | | | |
| 83 | 83 | 2507193 | 795 | 2507190 | | | |
| 84 | 84 | 2507535 | 617 | 2507533 | | | |
| 85 | 85 | 2507558 | 913 | 2507560 | 522 | 2507556 | upstream |
| 86 | 86 | 2507740 | 870 | 2507738 | | | |
| 87 | 87 | 2507920 | 941 | 2507918 | | | |
| 88 | 88 | 2508016 | 796 | 2508017 | | | |
| 89 | 89 | 2508076 | 797 | 2508077 | | | |
| 90 | 90 | 2508184 | 552 | 2508182 | | | |
| 91 | 91 | 2508454 | 871 | 2508455 | | | |
| 92 | 92 | 2509122 | 872 | 2509123 | | | |
| 93 | 93 | 2509421 | 942 | 2509419 | 460 | 2509417 | downstream |
| 94 | 94 | 2509689 | 724 | 2509687 | | | |
| 95 | 95 | 2509812 | 585 | 2509810 | | | |
| 96 | 96 | 2510622 | 725 | 2510620 | | | |
| 97 | 97 | 2512817 | 618 | 2512818 | | | |
| 98 | 98 | 2513039 | 586 | 2513037 | | | |
| 99 | 99 | 2513437 | 873 | 2513438 | | | |
| 100 | 100 | 2514574 | 891 | 2514575 | | | |
| 101 | 101 | 2514639 | 726 | 2514640 | | | |
| 102 | 102 | 2514917 | 727 | 2514918 | | | |
| 103 | 103 | 2514993 | 818 | 2514991 | | | |
| 104 | 104 | 2515125 | 553 | 2515126 | | | |
| 105 | 105 | 2519365 | 892 | 2519363 | | | |
| 106 | 106 | 2520309 | 748 | 2520310 | | | |
| 107 | 107 | 2520321 | 749 | 2520322 | | | |
| 108 | 108 | 2520815 | 798 | 2520813 | | | |
| 109 | 109 | 2520872 | 750 | 2520870 | | | |
| 110 | 110 | 2521221 | 846 | 2521222 | | | |
| 111 | 111 | 2521365 | 847 | 2521363 | | | |
| 112 | 112 | 2521462 | 819 | 2521464 | | | |
| 113 | 113 | 2521488 | 820 | 2521489 | | | |
| 114 | 114 | 2521520 | 821 | 2521518 | | | |
| 115 | 115 | 2521566 | 822 | 2521567 | | | |
| 116 | 116 | 2521693 | 823 | 2521691 | | | |
| 117 | 117 | 2521795 | 848 | 2521796 | | | |
| 118 | 118 | 2521836 | 849 | 2521834 | | | |
| 119 | 119 | 2521914 | 850 | 2521915 | | | |
| 120 | 120 | 2522106 | 851 | 2522104 | | | |
| 121 | 121 | 2522156 | 852 | 2522154 | | | |
| 122 | 122 | 2522180 | 853 | 2522182 | | | |
| 123 | 123 | 2522205 | 854 | 2522203 | | | |
| 124 | 124 | 2522208 | 855 | 2522206 | | | |
| 125 | 125 | 2522283 | 856 | 2522281 | | | |
| 126 | 126 | 2522388 | 824 | 2522386 | | | |
| 127 | 127 | 2522406 | 857 | 2522407 | | | |
| 128 | 128 | 2522427 | 858 | 2522425 | | | |
| 129 | 129 | 2522444 | 859 | 2522442 | | | |
| 130 | 130 | 2522739 | 825 | 2522737 | | | |
| 131 | 131 | 2522792 | 826 | 2522793 | | | |
| 132 | 132 | 2522843 | 619 | 2522844 | | | |
| 133 | 133 | 2523900 | 620 | 2523898 | | | |
| 134 | 134 | 2526395 | 621 | 2526396 | | | |
| 135 | 135 | 2526520 | 622 | 2526521 | | | |
| 136 | 136 | 2532645 | 728 | 2532646 | | | |
| 137 | 137 | 2532927 | 893 | 2532928 | | | |
| 138 | 138 | 2533225 | 729 | 2533223 | | | |
| 139 | 139 | 2533240 | 894 | 2533241 | | | |
| 140 | 140 | 2533877 | 461 | 2533878 | 463 | 2533879 | downstream |
| 141 | 141 | 2534949 | 623 | 2534950 | | | |
| 142 | 142 | 2535292 | 554 | 2535290 | | | |
| 143 | 143 | 2536836 | 827 | 2536837 | | | |
| 144 | 144 | 2537132 | 874 | 2537130 | | | |
| 145 | 145 | 2537146 | 943 | 2537144 | 500 | 2537141 | downstream |
| 146 | 146 | 2537379 | 751 | 2537380 | | | |
| 147 | 147 | 2538576 | 914 | 2538578 | 542 | 2538574 | upstream |
| 148 | 148 | 2538582 | 624 | 2538580 | | | |
| 149 | 149 | 2538893 | 875 | 2538891 | | | |
| 150 | 150 | 2538912 | 895 | 2538913 | | | |
| 151 | 151 | 2539582 | 501 | 2539580 | | | |
| 152 | 152 | 2540760 | 915 | 2540758 | 523 | 2540761 | upstream |
| 153 | 153 | 2542176 | 828 | 2542177 | | | |
| 154 | 154 | 2542314 | 799 | 2542315 | | | |
| 155 | 155 | 2542321 | 502 | 2542319 | | | |
| 156 | 156 | 2542504 | 916 | 2542506 | 543 | 2542502 | upstream |
| 157 | 157 | 2542546 | 800 | 2542544 | | | |
| 158 | 158 | 2542603 | 503 | 2542604 | | | |
| 159 | 159 | 2542660 | 625 | 2542658 | | | |
| 160 | 160 | 2542678 | 752 | 2542674 | | | |
| 161 | 161 | 2542856 | 730 | 2542857 | | | |
| 162 | 162 | 2542961 | 944 | 2542963 | 462 | 2542964 | downstream |
| 163 | 163 | 2542982 | 945 | 2542984 | | | |
| 164 | 164 | 2542993 | 946 | 2542995 | | | |
| 165 | 165 | 2543049 | 464 | 2543050 | | | |
| 166 | 166 | 2543336 | 731 | 2543334 | | | |
| 167 | 167 | 2543415 | 801 | 2543412 | | | |
| 168 | 168 | 2543456 | 555 | 2543457 | | | |
| 169 | 169 | 2543553 | 876 | 2543551 | | | |
| 170 | 170 | 2543727 | 829 | 2543728 | | | |
| 171 | 171 | 2544565 | 732 | 2544566 | | | |
| 172 | 172 | 2545576 | 556 | 2545577 | | | |
| 173 | 173 | 2545774 | 830 | 2545772 | | | |
| 174 | 174 | 2549059 | 753 | 2549056 | | | |
| 175 | 175 | 2549426 | 626 | 2549427 | | | |
| 176 | 176 | 2549542 | 896 | 2549543 | | | |
| 177 | 177 | 2549749 | 627 | 2549750 | | | |
| 178 | 178 | 2551318 | 947 | 2551320 | 465 | 2551321 | downstream |
| 179 | 179 | 2552263 | 628 | 2552264 | | | |
| 180 | 180 | 2553740 | 629 | 2553741 | | | |
| 181 | 181 | 2555300 | 754 | 2555301 | | | |
| 182 | 182 | 2555429 | 917 | 2555427 | | | |
| 183 | 183 | 2555732 | 918 | 2555730 | | | |
| 184 | 184 | 2555743 | 630 | 2555741 | | | |
| 185 | 185 | 2557277 | 631 | 2557278 | | | |
| 186 | 186 | 2559207 | 632 | 2559205 | | | |
| 187 | 187 | 2559356 | 633 | 2559354 | | | |
| 188 | 188 | 2559367 | 831 | 2559365 | | | |
| 189 | 189 | 2559541 | 860 | 2559542 | | | |
| 190 | 190 | 2559544 | 861 | 2559545 | | | |
| 191 | 191 | 2559747 | 733 | 2559748 | | | |
| 192 | 192 | 2560387 | 734 | 2560388 | | | |
| 193 | 193 | 2560437 | 634 | 2560438 | | | |
| 194 | 194 | 2560621 | 635 | 2560622 | | | |
| 195 | 195 | 2561184 | 755 | 2561182 | | | |
| 196 | 196 | 2563225 | 756 | 2563226 | | | |
| 197 | 197 | 2563834 | 832 | 2563835 | | | |
| 198 | 198 | 2564858 | 636 | 2564856 | | | |
| 199 | 199 | 2566876 | 757 | 2566873 | | | |
| 200 | 200 | 2568378 | 919 | 2568376 | 544 | 2568379 | upstream |
| 201 | 201 | 2569008 | 920 | 2569010 | 525 | 2569006 | upstream |
| 202 | 202 | 2569140 | 897 | 2569141 | | | |
| 203 | 203 | 2570277 | 637 | 2570278 | | | |
| 204 | 204 | 2570395 | 638 | 2570396 | | | |
| 205 | 205 | 2570998 | 639 | 2570999 | | | |
| 206 | 206 | 2572578 | 877 | 2572576 | | | |
| 207 | 207 | 2572822 | 898 | 2572823 | | | |
| 208 | 208 | 2572874 | 921 | 2572872 | 526 | 2572875 | upstream |
| 209 | 209 | 2572904 | 758 | 2572905 | | | |
| 210 | 210 | 2573626 | 759 | 2573624 | | | |
| 211 | 211 | 2573858 | 640 | 2573856 | | | |
| 212 | 212 | 2573979 | 862 | 2573977 | | | |
| 213 | 213 | 2574339 | 878 | 2574337 | | | |
| 214 | 214 | 2574480 | 760 | 2574478 | | | |
| 215 | 215 | 2575022 | 863 | 2575020 | | | |
| 216 | 216 | 2575248 | 466 | 2575246 | | | |
| 217 | 217 | 2575975 | 899 | 2575976 | | | |
| 218 | 218 | 2576124 | 833 | 2576125 | | | |
| 219 | 219 | 2576604 | 834 | 2576602 | | | |
| 220 | 220 | 2576783 | 641 | 2576781 | | | |
| 221 | 221 | 2578899 | 642 | 2578900 | | | |
| 222 | 222 | 2579280 | 802 | 2579281 | | | |
| 223 | 223 | 2580408 | 643 | 2580409 | | | |
| 224 | 224 | 2580412 | 864 | 2580413 | | | |
| 225 | 225 | 2581095 | 587 | 2581093 | | | |
| 226 | 226 | 2581145 | 588 | 2581146 | | | |
| 227 | 227 | 2581162 | 644 | 2581163 | | | |
| 228 | 228 | 2581239 | 922 | 2581241 | 545 | 2581237 | upstream |
| 229 | 229 | 2581436 | 645 | 2581434 | | | |
| 230 | 230 | 2581467 | 589 | 2581465 | | | |
| 231 | 231 | 2581554 | 803 | 2581551 | | | |
| 232 | 232 | 2581611 | 646 | 2581609 | | | |
| 233 | 233 | 2581622 | 647 | 2581620 | | | |
| 234 | 234 | 2581692 | 648 | 2581693 | | | |
| 235 | 235 | 2581801 | 649 | 2581799 | | | |
| 236 | 236 | 2581900 | 650 | 2581898 | | | |
| 237 | 237 | 2582748 | 590 | 2582746 | | | |
| 238 | 238 | 2585153 | 900 | 2585154 | | | |
| 239 | 239 | 2585490 | 761 | 2585488 | | | |
| 240 | 240 | 2585740 | 591 | 2585738 | | | |
| 241 | 241 | 2585756 | 505 | 2585757 | 493 | 2585758 | downstream |
| 242 | 242 | 2585858 | 651 | 2585859 | | | |
| 243 | 243 | 2585862 | 557 | 2585863 | | | |
| 244 | 244 | 2585963 | 652 | 2585964 | | | |
| 245 | 245 | 2585975 | 653 | 2585976 | | | |
| 246 | 246 | 2587058 | 558 | 2587059 | | | |
| 247 | 247 | 2594512 | 879 | 2594510 | | | |
| 248 | 248 | 2595285 | 654 | 2595286 | | | |
| 249 | 249 | 2595296 | 655 | 2595297 | | | |
| 250 | 250 | 2596238 | 901 | 2596236 | | | |
| 251 | 251 | 2607761 | 902 | 2607759 | | | |
| 252 | 252 | 2610314 | 903 | 2610312 | | | |
| 253 | 253 | 2618595 | 762 | 2618591 | | | |
| 254 | 254 | 2618809 | 735 | 2618810 | | | |
| 255 | 255 | 2619117 | 559 | 2619115 | | | |
| 256 | 256 | 2619261 | 656 | 2619262 | | | |
| 257 | 257 | 2621890 | 560 | 2621888 | | | |
| 258 | 258 | 2621901 | 763 | 2621908 | | | |
| 259 | 259 | 2628024 | 804 | 2628025 | | | |
| 260 | 260 | 2629316 | 880 | 2629314 | | | |
| 261 | 261 | 2631654 | 948 | 2631652 | 506 | 2631650 | downstream |
| 262 | 262 | 2631725 | 805 | 2631726 | | | |
| 263 | 263 | 2631733 | 806 | 2631730 | | | |
| 264 | 264 | 2631899 | 592 | 2631897 | | | |
| 265 | 265 | 2631942 | 835 | 2631940 | | | |
| 266 | 266 | 2635243 | 949 | 2635245 | 467 | 2635246 | downstream |
| 267 | 267 | 2636967 | 657 | 2636968 | | | |
| 268 | 268 | 2637525 | 865 | 2637523 | | | |
| 269 | 269 | 2639392 | 764 | 2639393 | | | |
| 270 | 270 | 2639486 | 836 | 2639484 | | | |
| 271 | 271 | 2639844 | 736 | 2639845 | | | |
| 272 | 272 | 2640111 | 658 | 2640109 | 504 | 2640108 | downstream |
| 273 | 273 | 2640390 | 904 | 2640391 | | | |
| 274 | 274 | 2640394 | 561 | 2640392 | | | |
| 275 | 275 | 2640521 | 807 | 2640528 | | | |
| 276 | 276 | 2640532 | 562 | 2640530 | | | |
| 277 | 277 | 2641112 | 546 | 2641110 | | | |
| 278 | 278 | 2641808 | 659 | 2641806 | 513 | 2641805 | downstream |
| 279 | 279 | 2641851 | 660 | 2641852 | | | |
| 280 | 280 | 2642080 | 593 | 2642081 | | | |
| 281 | 281 | 2642178 | 661 | 2642176 | 524 | 2642175 | downstream |
| 282 | 282 | 2642301 | 765 | 2642302 | | | |
| 283 | 283 | 2642927 | 737 | 2642928 | | | |
| 284 | 284 | 2643487 | 808 | 2643488 | | | |
| 285 | 285 | 2643718 | 507 | 2643716 | | | |
| 286 | 286 | 2643741 | 809 | 2643738 | | | |
| 287 | 287 | 2643749 | 810 | 2643750 | | | |
| 288 | 288 | 2643777 | 662 | 2643775 | | | |
| 289 | 289 | 2645072 | 923 | 2645074 | 547 | 2645070 | upstream |
| 290 | 290 | 2645389 | 738 | 2645387 | | | |
| 291 | 291 | 2645407 | 739 | 2645405 | | | |
| 292 | 292 | 2645582 | 663 | 2645583 | | | |
| 293 | 293 | 2645604 | 664 | 2645605 | | | |
| 294 | 294 | 2645609 | 665 | 2645607 | | | |
| 295 | 295 | 2645629 | 666 | 2645630 | | | |
| 296 | 296 | 2645965 | 811 | 2645962 | | | |
| 297 | 297 | 2645994 | 766 | 2645992 | | | |
| 298 | 298 | 2646041 | 812 | 2646042 | | | |
| 299 | 299 | 2646098 | 468 | 2646099 | 473 | 2646104 | far |
| | | | | | | | downstream |
| 300 | 300 | 2646113 | 950 | 2646115 | 469 | 2646116 | downstream |
| 301 | 301 | 2646119 | 667 | 2646117 | | | |
| 302 | 302 | 2646278 | 951 | 2646276 | 508 | 2646274 | downstream |
| 303 | 303 | 2646295 | 952 | 2646297 | 509 | 2646298 | downstream |
| 304 | 304 | 2646303 | 924 | 2646301 | 548 | 2646304 | upstream |
| 305 | 305 | 2646334 | 767 | 2646335 | | | |
| 306 | 306 | 2646355 | 563 | 2646353 | | | |
| 307 | 307 | 2646358 | 470 | 2646356 | | | |
| 308 | 308 | 2646390 | 925 | 2646388 | 527 | 2646391 | upstream |
| 309 | 309 | 2646408 | 528 | 2646406 | | | |
| 310 | 310 | 2646830 | 768 | 2646831 | | | |
| 311 | 311 | 2646934 | 668 | 2646932 | | | |
| 312 | 312 | 2646962 | 669 | 2646963 | | | |
| 313 | 313 | 2647076 | 529 | 2647077 | | | |
| 314 | 314 | 2647091 | | 2647092 | | | |
| 315 | 315 | 2647113 | 926 | 2647115 | 530 | 2647111 | upstream |
| 316 | 316 | 2647159 | 670 | 2647160 | | | |
| 317 | 317 | 2647165 | 671 | 2647163 | | | |
| 318 | 318 | 2647204 | 510 | 2647205 | | | |
| 319 | 319 | 2647896 | 813 | 2647893 | | | |
| 320 | 320 | 2648017 | 881 | 2648018 | | | |
| 321 | 321 | 2648219 | 672 | 2648220 | | | |
| 322 | 322 | 2648249 | 673 | 2648250 | | | |
| 323 | 323 | 2648260 | 740 | 2648261 | | | |
| 324 | 324 | 2648589 | 594 | 2648590 | | | |
| 325 | 325 | 2648617 | 953 | 2648615 | 511 | 2648613 | downstream |
| 326 | 326 | 2648628 | 512 | 2648626 | | | |
| 327 | 327 | 2648641 | 954 | 2648639 | | | |
| 328 | 328 | 2648953 | 471 | 2648954 | | | |
| 329 | 329 | 2649138 | 905 | 2649136 | | | |
| 330 | 330 | 2649178 | 674 | 2649176 | | | |
| 331 | 331 | 2649330 | 675 | 2649328 | | | |
| 332 | 332 | 2649348 | 676 | 2649349 | | | |
| 333 | 333 | 2649388 | 677 | 2649386 | | | |
| 334 | 334 | 2649407 | 678 | 2649408 | | | |
| 335 | 335 | 2649418 | 741 | 2649419 | | | |
| 336 | 336 | 2649881 | 679 | 2649882 | | | |
| 337 | 337 | 2650573 | 955 | 2650571 | 472 | 2650569 | downstream |
| 338 | 338 | 2650642 | 956 | 2650644 | | | |
| 339 | 339 | 2650650 | 957 | 2650648 | 474 | 2650646 | downstream |
| 340 | 340 | 2650663 | 475 | 2650661 | | | |
| 341 | 341 | 2650676 | 958 | 2650674 | 476 | 2650672 | downstream |
| 342 | 342 | 2652498 | 769 | 2652499 | | | |
| 343 | 343 | 2655342 | 564 | 2655343 | | | |
| 344 | 344 | 2655877 | 680 | 2655878 | | | |
| 345 | 345 | 2656012 | 927 | 2656014 | 531 | 2656010 | upstream |
| 346 | 346 | 2656041 | 770 | 2656038 | | | |
| 347 | 347 | 2656102 | 837 | 2656100 | | | |
| 348 | 348 | 2656122 | 771 | 2656119 | | | |
| 349 | 349 | 2656637 | 565 | 2656638 | | | |
| 350 | 350 | 2656683 | 681 | 2656681 | | | |
| 351 | 351 | 2656732 | 682 | 2656733 | | | |
| 352 | 352 | 2656745 | 928 | 2656747 | 532 | 2656743 | upstream |
| 353 | 353 | 2656872 | 566 | 2656870 | | | |
| 354 | 354 | 2656881 | 772 | 2656882 | | | |
| 355 | 355 | 2657264 | 773 | 2657265 | | | |
| 356 | 356 | 2657281 | 567 | 2657279 | | | |
| 357 | 357 | 2658718 | 959 | 2658716 | 477 | 2658714 | downstream |
| 358 | 358 | 2658736 | 960 | 2658738 | 478 | 2658739 | downstream |
| 359 | 359 | 2659684 | 774 | 2659685 | | | |
| 360 | 360 | 2660855 | 479 | 2660856 | | | |
| 361 | 361 | 2661138 | 929 | 2661136 | 533 | 2661139 | upstream |
| 362 | 362 | 2661149 | 930 | 2661147 | 534 | 2661150 | upstream |
| 363 | 363 | 2661203 | 568 | 2661204 | | | |
| 364 | 364 | 2661243 | 775 | 2661240 | | | |
| 365 | 365 | 2661723 | 776 | 2661724 | | | |
| 366 | 366 | 2661753 | 882 | 2661751 | | | |
| 367 | 367 | 2662365 | 683 | 2662363 | | | |
| 368 | 368 | 2663028 | 838 | 2663029 | | | |
| 369 | 369 | 2663104 | 569 | 2663105 | | | |
| 370 | 370 | 2663367 | 480 | 2663365 | | | |
| 371 | 371 | 2663380 | 481 | 2663378 | 490 | 2663377 | downstream |
| 372 | 372 | 2663400 | 482 | 2663398 | | | |
| 373 | 373 | 2663750 | 931 | 2663748 | 535 | 2663751 | upstream |
| 374 | 374 | 2663760 | 684 | 2663758 | | | |
| 375 | 375 | 2663780 | 685 | 2663781 | | | |
| 376 | 376 | 2663815 | 686 | 2663813 | | | |
| 377 | 377 | 2663833 | 932 | 2663835 | 536 | 2663831 | upstream |
| 378 | 378 | 2663974 | 933 | 2663976 | 537 | 2663972 | upstream |
| 379 | 379 | 2664009 | 687 | 2664010 | | | |
| 380 | 380 | 2664025 | 483 | 2664026 | | | |
| 381 | 381 | 2664156 | 934 | 2664154 | 538 | 2664157 | upstream |
| 382 | 382 | 2664342 | 777 | 2664339 | | | |
| 383 | 383 | 2664593 | 935 | 2664591 | 539 | 2664594 | upstream |
| 384 | 384 | 2664914 | 961 | 2664916 | 484 | 2664917 | downstream |
| 385 | 385 | 2664957 | 570 | 2664958 | | | |
| 386 | 386 | 2664986 | 688 | 2664987 | | | |
| 387 | 387 | 2665006 | 689 | 2665007 | | | |
| 388 | 388 | 2665109 | 962 | 2665107 | 485 | 2665105 | downstream |
| 389 | 389 | 2665325 | 571 | 2665323 | | | |
| 390 | 390 | 2665379 | 572 | 2665380 | | | |
| 391 | 391 | 2665417 | 573 | 2665418 | | | |
| 392 | 392 | 2665447 | 690 | 2665448 | | | |
| 393 | 393 | 2666085 | 963 | 2666087 | 486 | 2666088 | downstream |
| 394 | 394 | 2666163 | 839 | 2666164 | | | |
| 395 | 395 | 2666290 | 574 | 2666288 | | | |
| 396 | 396 | 2666471 | 691 | 2666469 | | | |
| 397 | 397 | 2666830 | 936 | 2666832 | 540 | 2666828 | upstream |
| 398 | 398 | 2667583 | 692 | 2667584 | | | |
| 399 | 399 | 2667596 | 964 | 2667598 | 487 | 2667599 | downstream |
| 400 | 400 | 2667609 | 883 | 2667610 | | | |
| 401 | 401 | 2667637 | 575 | 2667638 | | | |
| 402 | 402 | 2667659 | 840 | 2667661 | | | |
| 403 | 403 | 2667740 | 778 | 2667741 | | | |
| 404 | 404 | 2667863 | 693 | 2667864 | | | |
| 405 | 405 | 2667874 | 694 | 2667875 | | | |
| 406 | 406 | 2668940 | 576 | 2668938 | | | |
| 407 | 407 | 2669158 | 779 | 2669159 | | | |
| 408 | 408 | 2669252 | 695 | 2669250 | | | |
| 409 | 409 | 2669317 | 780 | 2669318 | | | |
| 410 | 410 | 2669455 | 841 | 2669452 | | | |
| 411 | 411 | 2670262 | 781 | 2670263 | | | |
| 412 | 412 | 2670431 | 696 | 2670429 | | | |
| 413 | 413 | 2670948 | 782 | 2670945 | | | |
| 414 | 414 | 2671509 | 697 | 2671510 | | | |
| 415 | 415 | 2671561 | 577 | 2671559 | | | |
| 416 | 416 | 2673019 | 698 | 2673017 | | | |
| 417 | 417 | 2673030 | 699 | 2673028 | | | |
| 418 | 418 | 2673085 | 700 | 2673086 | | | |
| 419 | 419 | 2673122 | 488 | 2673120 | 491 | 2673119 | downstream |
| 420 | 420 | 2673750 | 884 | 2673751 | | | |
| 421 | 421 | 2674873 | 701 | 2674874 | | | |
| 422 | 422 | 2674903 | 965 | 2674905 | 489 | 2674906 | downstream |
| 423 | 423 | 2674920 | 783 | 2674917 | | | |
| 424 | 424 | 2675029 | 966 | 2675031 | | | |
| 425 | 425 | 2675057 | 702 | 2675058 | | | |
| 426 | 426 | 2675141 | 703 | 2675139 | | | |
| 427 | 427 | 2675820 | 704 | 2675822 | | | |
| 428 | 428 | 2675905 | 705 | 2675906 | | | |
| 429 | 429 | 2678009 | 885 | 2678007 | | | |
| 430 | 430 | 2678104 | 886 | 2678102 | | | |
| 431 | 431 | 2678129 | 706 | 2678127 | | | |
| 432 | 432 | 2680715 | 784 | 2680716 | | | |
| 433 | 433 | 2680787 | 967 | 2680785 | | | |
| 434 | 434 | 2680813 | 707 | 2680814 | | | |
| 435 | 435 | 2681033 | 708 | 2681034 | | | |
| 436 | 436 | 2681040 | 968 | 2681038 | 492 | 2681036 | downstream |
| 437 | 437 | 2681339 | 709 | 2681340 | | | |
| 438 | 438 | 2682278 | 785 | 2682279 | | | |
| 439 | 439 | 2682344 | 578 | 2682345 | | | |
| 440 | 440 | 2682347 | 579 | 2682348 | | | |
| 441 | 441 | 2684692 | 580 | 2684690 | | | |
| 442 | 442 | 2684983 | 710 | 2684984 | | | |
| 443 | 443 | 2685267 | 711 | 2685265 | | | |
| 444 | 444 | 2687981 | 887 | 2687982 | | | |
| 445 | 445 | 2687986 | 712 | 2687984 | | | |
| 446 | 446 | 2687998 | 713 | 2687996 | | | |
| 447 | 447 | 2688086 | 786 | 2688083 | | | |
| 448 | 448 | 2688136 | 787 | 2688137 | | | |
| 449 | 449 | 2688183 | 788 | 2688184 | | | |
| 450 | 450 | 2688225 | 581 | 2688226 | | | |
| 451 | 451 | 2688430 | 969 | 2688428 | | | |
| 452 | 452 | 2689663 | 714 | 2689664 | | | |
| 453 | 453 | 2690183 | 888 | 2690184 | | | |
| 454 | 454 | 2690859 | 582 | 2690860 | | | |

[0636] In total, 454 exemplary effector protein and effector partner(s) combinations were identified and are set forth in TABLE 6. Some combinations (e.g., composition no. 454) identify an effector protein but do not identify any effector partners. For compositions listed without effector partners, it is envisioned that an effector partner candidate may be found by further genomic analysis.

### Example 2: Activity of Effector Protein and Effector Partner In Vitro

[0637] Effector proteins and effector partner combinations are tested for their ability to guide the direct transposition of a donor nucleic acid into a target plasmid in an in vitro assay. A first plasmid encoding an effector protein, a second plasmid encoding an effector partner, and a third target plasmid. Donor DNA can be generated from a plasmid or a linear double-stranded DNA molecule. The donor DNA contains the spectinomycin resistance gene with a structural motif, inverted terminal repeats (ITRs) that a transposase can recognize. Where more than one effector partner is identified for an effector protein (e.g., comp. no. 436 in TABLE 11 above), the second plasmid encoding the effector partner can further include one or more nucleotide sequences encoding the additional effector partners or the additional effector partners can be encoded by a fourth plasmid. Plasmids encoding the effector protein and effector partner(s) are bacterial nuc-doc expression vectors. A target plasmid containing an 51 spacer (5′-TATTAAATACTCGTATTGCTGTTCGATTAT-3′ (SEQ ID NO: 984) and an ampicillin resistance gene are also generated.

[0638] To test for transposase activity, plasmids encoding the effector proteins and effector partners are contacted with a guide RNA, in combinations for example, as set forth in TABLE 3, along with the donor DNA and the target template. The composition is incubated for a sufficient amount of time to allow the effector protein and/or effector partners to recognize the ITRs and direct transposition of the donor nucleic acid to the 51 spacer in the target plasmid. The insertion of the donor DNA into the target plasmid demonstrates the transposase activity of the effector protein and effector partner combinations. After transposition, the target plasmid will contain the spectinomycin and ampicillin resistance genes. The target plasmid is then transformed into E. coli and screened using spectinomycin and ampicillin. Only target plasmids that have successfully been transposed into will allow transformed bacteria to survive both antibiotics. Next, plasmids from the surviving colonies are sequenced by next generation sequencing (NGS) of PCR amplicons to assess whether the donor DNA was integrated in the target site as directed by the guide RNA, as well as PAM requirements of the same. Controls can include gene products of MuA, MuB, IstA, and IstB.

### Example 3: Indel Activity of Effector Proteins and Effector Partners in Lipofected Eukaryotic Cells

[0639] Effector proteins and/or effector partners combinations as described in Example 1 are tested for their ability to form indels within a target nucleic acid (e.g., genomic DNA) in eukaryotic cells (e.g., immune cell, T cell, HEK29 cell, or any other eukaryotic cell). Plasmid pairs co-expressing the effector protein, effector partner(s), and gRNA (1 plasmid/target) are delivered to eukaryotic cells via lipofection using a lipofection reagent. Lipofected cells are incubated to allow for indel formation. Indels are detected by next generation sequencing (NGS) of PCR amplicons at the targeted loci, and indel percentage is calculated as the fraction of sequencing reads containing insertions or deletions relative to an unedited reference sequence.

[0640] While preferred embodiments of the present invention have been shown and described herein, it will be obvious to those skilled in the art that such embodiments are provided by way of example only. Numerous variations, changes, and substitutions will now occur to those skilled in the art without departing from the invention. It should be understood that various alternatives to the embodiments of the invention described herein may be employed in practicing the invention. It is intended that the following claims define the scope of the invention and that methods and structures within the scope of these claims and their equivalents be covered thereby.

1.-60. (canceled)

61. A composition that comprises:
(i) a polypeptide, or a nucleic acid encoding the polypeptide, wherein the polypeptide comprises an amino acid sequence that is at least 75% identical to any one of the sequences set forth in TABLE 1; and
(ii) an engineered guide nucleic acid or a DNA molecule that encodes the engineered guide nucleic acid.

62. The composition of claim 1, wherein the composition comprises one or more partner polypeptides, wherein the one or more partner polypeptides comprises an amino acid sequence that is at least 75% identical to any one of the sequences set forth in TABLE 1.1.

63. The composition of claim 2, wherein the composition comprises a polypeptide and a partner polypeptide combination as described in TABLE 6.

64. The composition of claim 1, wherein the composition comprises a donor nucleic acid.

65. The composition of claim 1, wherein the polypeptide has site-specific recombinase activity.

66. The composition of claim 1, wherein the polypeptide has transposase activity.

67. A nucleic acid expression vector that encodes a polypeptide, wherein the polypeptide comprises an amino acid sequence that is at least 75% identical to any one of the sequences set forth in TABLE 1.

68. A system comprising:
(i) a polypeptide, or a nucleic acid encoding the polypeptide, wherein the polypeptide comprises an amino acid sequence that is at least 75% identical to any one of the sequences set forth in TABLE 1; and
(ii) an engineered guide nucleic acid or a DNA molecule that encodes the engineered guide nucleic acid.

69. A method of modifying a target nucleic acid within a human gene, or associated with expression of a human gene, the method comprising contacting the target nucleic acid with the composition of claim 1.

70. A cell that comprises a target nucleic acid modified by the composition of claim 1.

71. A method of treating a disease associated with a mutation or aberrant expression of a human gene in a subject in need thereof, the method comprising administering to the subject the composition of claim 1.

72. The method of claim 71, wherein the disease is any one of the diseases recited in TABLE 5 and/or wherein the human gene is a gene recited in TABLE 4.

The application's sequence listing, which the Patent Office published only in electronic form, follows.

SEQUENCE LISTING (1022 sequences)

SEQ ID NO: 1 - protein, 494 aa, synthetic construct
MIDQRMIFEIHRLADEGLSPRKIARTLALSRKTVVKYLKDPNPRPPAAARASKLDPFKDEIDRMLETAPFVSAVVVRQRLMAFGFDGGITIVKDYLGKLRRTHKYKKAFIRFESAPGEQCQIDWAHFGSMAYGNTKRKLYCLAVIESHSRLLYLEFTHSQRQETLHRCLYNAFCFFHGTPRELVHDNMLTAVIERDGSLIRYNERFLAFLRPFKIIPRACNVASPHEKGKIEKGAIHYIRYNFWPLRSFKDLEDLQAQADHWRDQQANRRLHNTTGERPADRFRPEAMRPLPEFVPDCRDTATVKVSADFAVRFDGNAYTAPPWAVGKQVTLKADNQNVTIYFKEKSIAAHRRSWQRKERIESTAHREAAQKHQRRLWHSQEVAALISLGEEAKVYIERLAMARVGLKGNIRKLLALKDEYGAYALVEAMKRAISHSAYGADYIENILYQDMTPQRQHPPVQLKEERLNRIRLQEPCLAEYDAFVVKRRNKHDE

SEQ ID NO: 2 - protein, 493 aa, synthetic construct
MIDYETFMKIKHCQNSHGLKPPQIAQKLALDVRTVEKWCRQDRYRPRKPARRPSKLDPFKSEILRMLDYYPYTAVQIFQRIGENGYEGGYTIVKDYVRRVRPKRQKAFLKLAFAPGQCAQVDWGSWGTVAVGGTVRRLSFFVMVLCYSRLMYVAFTVSQTMEHFLDCHRRAFERFGGATKTVMVDNLKSAVLKRIVGQPPVFNPKYLDFADHYGFDIVACGKAKGNEKGRVESAVGYVKKNFLAGLDIADFAAVNPAAEHWMDTVANVRLHGETGKRPADMFAAEKDCLRPLPQNPYDVATISTVRASRQFRVTVDTNRYSVPAEYAGAQLTLKSYPQRLCIYAKEKLIARHVRSYDRRKDFENPDHVKPLLIQRKKAKDQKLFMRFLTLSDKAEAYYRQMQQRRLNPAHHVRQIVALSEIYGDETVARAIDDALYFNAFSSEYIVNLVQQRKRIRSQPGALQLTRRQDLLELSVPQPDLSVYDQAIEDEDEK

SEQ ID NO: 3 - protein, 489 aa, synthetic construct
MLGLDRRTVGRYREWATAQQLLDGTLPSVEELQALVETTLREPLPPQNTSSVAGYRETVTRLRAEGVEIAAIRERLKEQGFAGSYQAVYRFVKALETPTPEVVVRVETAPGEEGQVDFGYAGRLIDPASGQLRKAWVFVVTLSWSRHQYAELVWNQSVATWIQCHRHALEFFGGVPQRLVIDNLKAGVVKASFDDPLVQMTYRECAEHYGFLIAPCRVRTPEHKGKVEQGGVHYVKRNFLGGREPQPLPQANAALRQWCLTTAGQRIHGTTKVAPLTRFQDVEKARLRPLPETPYDVAVWKVATVGRDGYITFDNAYYSVPCAWVGQSVNVRGGSDSVRIYDLEHHLLTTHTRASQPGTRLTKLEHLPPEKVAGVLLDRPACQAAAQEIGTATAQVVQHLLDDPAIDHLRPVISLLHLRETYGDARLEAACARALHFGEYRYGIIKRILQQRQDQEALPAPTRTPVTAQTFVRTAADLLGHLFGGAVWN

SEQ ID NO: 4 - protein, 493 aa, synthetic construct
VIDFAQYTRMQHLHKEDKLTHQQIAQKLSLDSKTVAKWLKRERFDARKNAGRSSKLDPHKALIRVWLEKHPYSAQQIFQRLIAENAFSGGYTIVKEYVRKVRPRPEKAFLSLSFAPGESAQVDWGHCGTIAVGNTRRALSVFVMVLSHSRQMYIEFTLSQKQEHFLACHEHAFEYFGGVPESVMVDNLKSAVLEHKRGETPRWNPRYADFARDYGFEIVACNPRAPQEKGRVENGVGYVKKNFLAGRQFQDFHHIAPSARQWLDLIANERVHRVTQQKPRVLWEAERAHLQSLPLNPPETARILRQRATSTFRLCIETNRYSVPAQYASHTLEVHLDAQELRVYHEGSEVARHRRDYGRHGDFENPDHPKALLAGRQKARAHKALQSFLQLGEHAEAFYHGLQKRRLNAPMHLRKIIALEGVYTRAQLSEAISDAHQIEAYSSEYIINLLGQRERPLVQPGPLHLTRPGDQLDIETPQADLSIYDTTPTNQQK

SEQ ID NO: 5 - protein, 488 aa, synthetic construct
MIDYDLYCKMMHLKRNEGLNAAQIADALAVDVRTVRKWLQRNAFAPRTGLQRAGKLDPFKREIGRLLEAHPYSAMQIHQRICQQGFAGGYTIVKDYVRKVRPPKVRAFLTLSFAPGECAQVDWGSYGTVAVGAALRRLSFFVMVLCYSRMMYVQFTVSQTMEHFLDCHQNAFEYFGAVPKRVMVDNLKSAVLKRIVGQAPVFNPRYLDFAAHCGFDITACNVGKGNEKGRVENGVGYVKKNLLAGLDIPDFTALAPTAAHWLDTVANVRIHGETREKPVVLFEKERPCLNRLPVKRYDVATVYPVRATNQFRVTFDTNRYSVPAEYASRALIAKLSPEWICIYHDNRLIARHVRCYDRHRDIEDPDHPKQLLLWRKKAREQKIVMRFMSLSPKAAGYYRKLEQRRMNPYHHVQKIVALSEIHGTEAVARALEDAFVFEAFSCEYIANLLEQRSRPVVSPGALHLTRRQDLLELEVESADLSLYQENSP

SEQ ID NO: 6 - protein, 493 aa, synthetic construct
VIDFAQYTRMQHLHKEDKLTHQQIAQKLSLDSKTVAKWLKRERFDARKNAGRSSKLDPHKALIRAWLEKHPYSAQQIFQRLIAENAFSGGYTIVKEYVRKVRPRPEKAFLSLSFAPGESAQVDWGHCGTIAVGNTRRALSVFVMVLSHSRQMYIEFTLSQKQEHFLACHEHAFEYFGGVPESVMVDNLKSAVLEHKRGETPRWNPRYADFARDYGFEIVACNPRAPQEKGRVENGVGYVKKNFLAGRQFQDFHHIAPSARQWLDLIANERVHRVTQQKPRVLWEAERAHLQSLPLNPPETARILRQRATSTFRLCIETNRYSVPAQYASHTLEVHLEAQELRVYHEGSEVARHRRDYGRHGDFENPDHPKALLAGRQKARAHKALQSFLQLGEHAEAFYHGLQKRRLNAPMHLRKIIALEGVYTRAQLSEAISDAHQIEAYSSEYIINLLGQRERPLVEPGPLHLTRPGDQLDIETPQADLSIYDTTPTNQQK

SEQ ID NO: 7 - protein, 521 aa, synthetic construct
MSLIKQVIQLKQLGESNRGVSRKLSINKGTVNAYVNIIQCNGLSYDDLLSKDDPELDRLFHAGSPAYSDPRMADFLAKLPYFKEQLSNPKLHVTRQLLYEEYKAGYSHGYGKSQFYFHLQQNLVAQKDCTAVLTETYNPGEKLMVDFAGDKLSYIDTETGEIIKVEVFVACMPYSDYTYVICVPSQKTEDFLFAIRMCMEYLGGVPPILTPDNLKSAVITNDRHEPKLNKALEDMGNHYHFVVLPCDPKEPTQKALVEDKVQTTYNRIYAKLRGRTFYSIVELNRAVWDLLSLFNKTRMQKRPYSREERFHAAEKDKLKQLPQNIYEMKYYANLQVQTNCFVELRQDKVTHFYSVPYIHVGKKALVIFTRSVVNIYINGTQVATHMRSYEYGHTYIKEHLASNCRAIMERSASYYITWASHISPECRNYISEVFNPQRTSQPEEVYYKLCASIMSLSRKYEVAIIDKTCRQCRECKVFSYRKFEAILKHNSLIASEDEPTRCFEAPAPTDHANMRGSNYFK

SEQ ID NO: 8 - protein, 383 aa, synthetic construct
LTLSFAPGECAQVDWGSYGTVNVGSTKRRLSFFVMVLCYSRMMYVEFTVSQTMEHFLGCHQNAFEFFNCVPKKIMVDNLKSAVLKRIVGQVPVFNPKYVDFARHFGFNIVPCNVGKVNEKGRVENAVGYVKKNFLAGLDIPDFSVLAPASRDWLDSIANVRTHGQTRQKPLDLFQKEKPFLNPLPANPFDVASVYQVRASSQFRITLDTNHYSVPAEYASTRLTLKAYPDRLCIYSEDKLIARHARSYDRYQDFEDPDHPKELLRQRRRARDQKIFMRFLTLSPMAEQYYCKLELRRMNPHHHIRKIVALSEIYPPDDVRRAIEDAFAFEAFSSEYITNLLEQRSRSLPQPQALQLTRREDLLDIKLDQPDLTIYERKKDEGE

SEQ ID NO: 9 - protein, 520 aa, synthetic construct
MPGKRKKTMDIREILRHLQRGRSDRAIGAATGVNRKTVRRYRLWATEQGLLSGELPPLGELNRLLEETMRSSPPPQNVSSVELYREVIEKLRQAKVEVTAIHQRLQERGYTGSYSSVRRFVQRLEPSAPEVTVRVETPPGEEGQIDFGYAGQMVDPETGQLRRAWAFVLVLSWSRHQYVEFVFDQTVATWLRLHRNAFDYLGGVPDRVVIDNLKSGIARLCFQEAQAQHAYRECAEHYGFLISPCRPRTPQHKGKVEQGGVHYVKRNFLAGREPMTLTEANRQVLRWVETTAGRRTHGTTKEQPLARFETERQALRPLPTTPYDLAVWKQVKLHRDCYVTFEQAYYSAPFGLVGQQLWVRGGTREIQIYDSDYQWVATHSRAQRPGQRLTNLDHLPPHKLPGLVLSRAGCRERAAEIGTATGQVVDGFLDHHPEDRLRTAGRLLRLSERFSPDRLEAACARALSFDDPAYVTIKRILDEGLDIVALPSVAPAPPARVFVRTATELVGHLEGGVSWNSCTK

SEQ ID NO: 10 - protein, 613 aa, synthetic construct
MTKSSVFFRSIPVQWVKNEFGYNFFRSIPIHFLTKVVLRISFPEYTHSFMSLNNRSLLLFFRGIPVHFYRFLSYLCIRNKNSSTEMAGTIKDMSLIKQVIQLKQLGESNRGVSRKLSINKGTVNAYVNIIQCNGLSYDDLLSKDDPELDRLFHAGSPAYSDPRMADFLAKLPYFKEQLSNPKLHVTRQLLYEEYKAGYSHGYGKSQFYFHLQQNLVAQKDCTAVLTETYNPGEKLMVDFAGDKLSYIDTETGEIIKVEVFVACMPYSDYTYVICVPSQKTEDFLFAIRMCMEYLGGVPPILTPDNLKSAVITNDRHEPKLNKALEDMGNHYHFVVLPCDPKEPTQKALVEDKVQTTYNRIYAKLRGRTFYSIVELNRAVWDLLSLFNKTRMQKRPYSREERFHAAEKDKLKQLPQNIYEMKYYANLQVQTNCFVELRQDKVTHFYSVPYIHVGKKALVIFTRSVVNIYINGTQVATHMRSYEYGHTYIKEHLASNCRAIMERSASYYITWASHISPECRNYISEVFNPQRTSQPEEVYYKLCASIMSLSRKYEVAIIDKTCRQCRECKVFSYRKFEAILKHNSLIASEDEPTRCFEAPAPTDHANMRGSNYFK

SEQ ID NO: 11 - protein, 498 aa, synthetic construct
MIDYNTFLEIKDLHQHHGLKCTQIAGKLNLDERTVNKWLKENQFRQRKSTQRSSKLDAFKDDIVRMLETHPYSAVQIFQRITDEGFDGGYTIVKEYVRKVRPKREKAFLTLSFAPGECAQVDWGSYGTAPVGETFRRLSFFVMVLCYSRMMYVEFTVSQTMEHFLGCHQNAFHHFGAVPGKIMVDNLKSAVLKRLTGQAPMLNPKYKDFADHYGFEIAPCGVGKGNEKGRVENAVGYVKKNFLSGLEITDFSAVNPAAMHWLDTVANVRIHGETGKKPVDMFQDERAYLKALPIHPYDIATIKPMRASGQFRITVDTNRYSVPAEYAGQPLTVKTYPDRLCIYHQDNLIARHVRSYDRRKDFEFPDHPKALLAQRKKARDQRIFTAFLALHQGADDYYRQLEQRRMNPLHHIRQIVALSEMYGKDQTSRAIDDAFFFNAFSCEYIANLLEQQARKLPEPGALHLTRRQDLLQLTLQKPDMSIYDRFSMPKKENDDEKQ

SEQ ID NO: 12 - protein, 513 aa, synthetic construct
MERIHMNYYKDIIYRLRAGESERQISRDLGISRPTIHKYKMKAEAEGLLENGSLPEDHQLLESLGPAPQPPREPSSLEPYREKVEKYVEQGLEMTAIYQRLKEQVGYCGSYSSVRRFVYHLKPQEPEAYVRIHTDPGEEMQVDFGSVGNLFDPKTGKIRPAYGFVATLSHSRHQYAELVFDQKTATWIGLHQRAFEFFGGAPKRVVLDNLKAGVVKALVIDPILGEAYRKLAQHYGFLASPNKPRTPRHKGKVENGVHYLKRNFLAGQEFVDIESANRHLRRWVMETAGSRQHGTTRQVPLAVFREVEQKALLPLPVKPFTLCEIRTAKVHPDCHIVVDGSYYSVSFLWIGKEVEVHIHERVIEIYAEHELVRTHLRARQKGSWRTEMTDYPPYKAEYLMKTPAYCRRAAEQIGPYTRQVVEELFSDGVLDRLRSVQAILQLEKSVGANRLEAACRRALFFGDGRYRRIKEILNAALDKEPLPEEIPAFSCSQEFTFARKPQEFFHATEKRVQ

SEQ ID NO: 13 - protein, 370 aa, synthetic construct
MERMHMNHIRDIIHRLRQGQSERQISRDTRIARQTIHKYKQWAEARGYLSPDSPLPEHATLAAALGPVIPPPRPRSTLEPCRARIEKWHAAGVEMMAIWQRLQEEYHYPGSYSSVRRFCHRLNPTTPTAVVRVHTAPGEEMQVDFGYIGKIYDPRRGKMRKAYVFVATLSHSRHQYAEIVFEQKIATWLALHRRAFEYFGGVPRRVVPDNLKAAVSKALIIDPILAEAYRRFALHYNFLISPTRPRTPQHKGKVENGVHYVKRNFIAGRTFADIDAANARLKIWVKEIAGARIHGTTRQAPWQVFHTVERAQLQPLPEKPFHLLAIKPVKSSSRLSHHAGWQLLFRAASLPWPAPRRAHPRKDDLSLRRY

SEQ ID NO: 14 - protein, 514 aa, synthetic construct
MERMHMNHIRDIIHRLRQGQSERQISRDTRIARQTIHKYKQWAEARGYLSPDSPLPEHATLAAALGPVIPPPRPRSTLEPCRARIEKWHAAGVEMMAIWQRLQEEYHYPGSYSSVRRFCHRLNPTTPTAVVRVHTAPGEEMQVDFGYIGKIYDPRRGKMRKAYVFVATLSHSRHQYAEIVFEQKIATWLALHRRAFEYFGGVPRRVVPDNLKAAVSKALIIDPILAEAYRRFALHYNFLISPTRPRTPQHKGKVENGVHYVKRNFIAGRTFADIDAANARLKIWVKEIAGARIHGTTRQAPWQVFHTVERAQLQPLPEKPFHLLAIKPVKVHRDCHITLDGNYYSAPHRYLGRRLDAHIHEKMIYLYDGTELVTSHLRSFGAGHWRTRLDDYPPEKAAYLKRTPPKCRENAKNIGPATAHIINTLLDTRPLDRLRTAQNILRPAEKVGPKRLERACARAIYFDDIQYQRVKQILNAGLDDDPLPGEPPVVEPVQPFQFARDAQEFFPQNGGLPC

SEQ ID NO: 15 - protein, 493 aa, synthetic construct
VIDFAQYTHMQHLHKEDKLTHQQIAQKLSLDSKTVAKWLKRDRFEARKNAGRSSKLDPHKALIRAWLEKHPYSAQQIFQRLIAENAFSGGYTIVKEYVRKVRPRAEKAFLSLSFAPGESAQVDWGHCGTIAVGNTRRALSVFVMVLSHSRQMYIEFTLSQKQEHFLACHEHAFEYFGGVPQSVMVDNLKSAVLEHKRGQSPRWNPRYADFARDYGFDIVACNPRAPQEKGRVENGVGYVKKNFFAGRQFQDFHHIAPSARQWLDLIANERVHRVTQQKPRVLWEAERPHLQSLPLNPPETASILRQRATSTFRLCIETNRYSVPAQYASHYLDVHLDAQELRVYHEGSEVARHRRDYGRHGDFENADHPKALLAGRQKARAHKTLQSFLQLGEHAEAFYHGLQKRRLNAPTHLRKIIALEGVYTRAQIAEAISDAHQIEAYSSEYIINLLGQRERPLVEPGPLHLTRPGDQLDIETPQADLSIYETTPTNEQK

SEQ ID NO: 16 - protein, 501 aa, synthetic construct
VPGRHVTDCQKRLFMKLRKTHTVEVAAAKAGFSRATGYRLAADPPLPDQEAKPRGRRRPDPLADVFDTVVVPILENSPSIRPIGVFQELMRRHPELDPGVRRTLERRICLWRAEHGQEQDVIFRQKHEPGRQGLSDFTHMGALGVTVAGEPLDHLLYHFRLAWSGFTHARVVLGGESFTALAEGLQDALWHLGGVPREHRTDSLSAAFCNLRKDEAEDTTERYKALCAHYGMTVSRNNRGLAHENGSIEGPHGHLKRSVADALALRGSSDFDDLDAYRSFIAEVVGRANAHRSKAIEAERATLGDLPAIRTADYEPISVNVTSSSGFVLRRVFYTVPSRLIGHRLGGRIYDDRIELFLSGTHLLTLPRGRAGATGPNVHVVNYRHVIHSLKKKPMALLNLVYRDELFPREAYRRCFEKALERLSERQACRLAVALLALAHEESCEAELATEIDRALKAGQLPDPGELKAHFAPQRGKMPSVNVTRPPLVSYGSLLSAGDAA

SEQ ID NO: 17 - protein, 514 aa, synthetic construct
  VARIANT 164: note = Any naturally occurring amino acid
  VARIANT 231: note = Any naturally occurring amino acid
MERLHMNHLRDLIHRLRAGESERQIARDLRISRPTVHKYHLLAKREGYLETGSALPDDATLLKVLGPGPRPPKSVSSLEPHRGAIENLLKQNVEMTAIWQRLRDNYGYTGSYSAVRRFVSHLEPEAPEAYTRVHTQPGEEMQVDFGSVGQLYDPATGRIRTAYXFVATLGFSRHQYAELVFDQKIATWIGLHRRAFEWFGGVVRRVVPDNLKAAVLDALVYDPVLGEAYRXMALHYGFLISPTRPATPRHKGKVESGVHYVQRNFMAGQEFADIHFANQHLQAWVMEVAGARQHGTTHQPPLRLFREVEQAALLPLPDEPFSLCEIRPVKVHPDCHVVIAGSYYSVPYTCVGQKLDAFVREQVVELYQGQQLVATHLRCQAPGQWQTRLEHYPPHKAAYLQRTPDFCRKTAEQIGPATRQAVETLLADRPLDRLRTVQAILRLEDTVGPQRLEAACARAVYYGDVCYRRIKAILNAALDREPLPDLPPAPLSQPHAFARAGAEFFALAAEVEPC

SEQ ID NO: 18 - protein, 497 aa, synthetic construct
VPGKRITDHQVTKYKTLRVNYNQEAAAAKTGISVASARRIESMAALPSQRPPRNWRTRSDPLADVWSGEVVPLLEATPGLMAVTVLEELQRRHPERFGESVLRTLQRRMRQWRAEHGEERELFFAQEHPPGRLGLSDSTVADQLGVVIAGASLPHRLYQFAFAHSGWRHVSVVLGGESFQALSSGLQAALWMAGGVPEEHRTDSLWAAFNNLAEQEELTRNYEALCAHYGLRASRNNPGESHENGSIEARQGSLKLALDQALLLRGSRAFDALADYEQFVAEVVRRLNARCARGWEAERGCLRPLPPRRAVDFEEVDARVSKYGVFTAKSSMYSVPSRLVGHVLKVRLFSAHLEAWLGGVKVFECERLYSSTTDKYPRRIDWRHMLPALKRKPGAFARWVLRDAMFPRSEYARTWAHISERLTERQACKLMVGLLDLADRANVVNELAGVLHGLVEQGEVPDLDALVDRFAPRPACMPEVRVVLPAPIVYDALLEAA

SEQ ID NO: 19 - protein, 502 aa, synthetic construct
LPGRHVTDRQMRLFMQFRKSDPAAVAAAKAGFSPATAYRLEKDPRLPSQKTAPRARRRPDPLEGVWDSEVVPMLKAAPGLRPIGVLEELRRRHPELDAGVRRTLERRIRNWRAIHGPEQEVIFRQEHPPGRMGLSDFCDMRNLNVSVAGVPLDHRLYHFRLPFSGFESAHVVLGGESFVALAEGLQNALWTLGGAPQQHRSDSLSAAFRNLDADAKDDMTRRYEALCAHYGMTPTRNNKGVSHENGSIESAHGHIKAALEDELLLRGSRDFDDLGAWRKFVDELVGRRNARNAARMDLERAELKELPPRKTSDFEEERVSVTSSSAFTLRKVFYTVPSRLIGRKLLVRLYDDRLEVFQGSTHLFDLPRGRPGPNGKHGHVVDYRHVIHSLRRKPMALLNLVYRGQLFPRRAYARAFDMLLAESGEKAACKIMVGLLALAHERACEAELAIAIEEELDAGRPPNLATLTERFAPKTAAAPNVIVALPELAVYDALASLEGAAA

SEQ ID NO: 20 - protein, 482 aa, synthetic construct
  VARIANT 274: note = Any naturally occurring amino acid
MTHEQKLSRREIARQLHVCRRTIRKYLANPLAKAAVRKPRSSKLDSFKPVIRELLDQWPRASSVVIGQRIESLGYTGGKSILQEYVATLRQVRNPPRAYVRIESSPGDCFQIDWGHFGSIDYQGDKRKLYAFCCVECHSRRLYVEFTHSQCFETFIRCHIHAFQFMSGRARECLYDNLTTSVAEHDGRIVRFNPRFLAFAREMGFYPKACNKAAGWEKGKVENSVGYLRKNFWPLRTFMDLSDVNSQVRQWLEQIANKRIHRETRQIPEERFRXECLGSLPPILPDYRDTAIPLVRKDARICFDGNRYCVHPDYGGFHLTVRADSQAVAIYDHDNEVTRYARCWRRGQTLGAERFEKELLEQRPAAQRSAAQRRLILLLGETGESYLRQLAQTDRSLSRQIKELLILVRQYSPESILAAIRKAQAVGAFGADYIANILMQEQSARDIQPQLRLKDPRLNELATDPLSLLDYDALILIQRSES

SEQ ID NO: 21 - protein, 495 aa, synthetic construct
MAEDPQTIEAIYRMTHEQKLSRREIARQLHVCRRTIRKYLNNPLAKAAVPKPRASKLDPFKPVIRELLDQWPRASSVVIGQRIQSLGYTGGKSIFQEYMATLRQIRNPARAYLRIESSPGECFQIDWGHFGSIDYQGDKRKLYAFCCVECHSRRLYVEFTHSQCFETFVRCHIHAFQFMGGRTKECLYDNLTTSVAEHDGRIVRFNPRFLAFARELGFYPKACNKAAGWEKGKVENSVGYIRKNFWPLRTFMDLSDVNSQVRQWLEQIANKRIHRETRQIPEDRFRPECLGSLPPILPDYRDNASPLVRKDARLHFDGNRYCVHPRYVGFHLTVRADAQAVAIYDHDNEVTSYARCWRRGQTLGFERFEKELLEQRPAAQRSAAQRRLILFLGETGESYLRQLAETDRSLSRQIKELLGLVRQYGPDSVLAAIRKAHIAGAFGADYIANILMQEQSARDIQPLLRLNDPRLNELTTDPLSLLDYDALILTQRSDS

SEQ ID NO: 22 - protein, 488 aa, synthetic construct
MIDYETYVRIRNYVTRDGLNISQISEELGLDQRTVARWVNQTRYIQRKPALRTSKLDPFKKDILQMLEKHRYTGRQVFQRITENGFEGGFTIVTDYVRKIRPTQTTPFLKLVFAPGECAQVDWGSYGTVRVGSTTRRLSFFVMVLCHSRMMYIEFTAQTMEHFLGCHQNAFQFFGSVPQKIMVDNLKSAVLKRTVGRAPVFNPRYLDFAGHYGFTIVPCNVGKGNEKGIVENGVGYVKKNLLNGLCISDFGIMAPVAQNWLDTVANVRSHRETGKRPVDMFHEEKPSLQRLPLEPYDIGVVKQARASRQFRVTIDTNRYSVPAQLAGVGLTVKLYPDRLCFYHENKLMARHVRSYDRLRDFEHPDHPKAVLAQRKKAQEQKIFMTFLTLSDKAREYYRQLEQRRMNPFHHIRQIVALSEIYPKEKVALAIEDAFSFSAFSCDYIANLLEQRSRIIKEPGVLHLTRSSDLLDLTIEKPDMSIYNIGGEK

SEQ ID NO: 23 - protein, 503 aa, synthetic construct
MIDYPTYCRIHVLAAENGLNASQIAAELGLHLDTVTKWLNEPKYRARKSTVRASKLDPFKPRILRMLERYSYSAAQILTRLREEGYEGGYSILKQYVRKVRPPRRPAYLTLHFEPGECAQVDWGHAGVIGVGNTRRRLSFFVMVLAHSRMLYVEFTLGQCMEQFLACHQNAFEAFGGSVRRVMVDNLKSAVLSHPAGQPAVLNPRYLDFASHYGFEVTACNVRAANEKGRVENGVRYVRRSFLAGLELDAFAPLNPAVRHWLDTVANPRIHGETHRRPVDLFEEERPTLLPLPLAPYDVGTPRPVTATPQFRVSLDANRYSVPSEYAGARLILRQYPDKVLIYHQGQLIAEHPRSYQRHLDILEPDHQRRLLQQRRKGREQVLVMQLMRISPRAEELIAGLQHRRLNPTSHIRKIVALGEIYGRDELARAIDDAIEYHAFSSEYIANILEQRARHLPEPGALHLTRREDLLDIDLPDPDLSIYQHDEDPPPENTDDEEQDPHR

SEQ ID NO: 24 - protein, 489 aa, synthetic construct
MIDYETYVRIRNYFTNDGLKYSQIADELGLDCRTVAKWANQARYLPRRSAKRVSKLDPFKNEIVRMLEKHPYTARQIFQRLQEGGFDGGITILTDYVRKIRPPKVRPYLKLVFAPGECAQVDWGTYGNVRVGSTSRRLSFFIMVLCHSRMMYVEFTVSQTMEHFLGCHQNAFHFFGSVPQKIMVDNLKSAVLKRTIGKDPVFNPRYMDFANHYGFKIVACNVGKGNEKGIVENAVGYVKKNLLNGLAITDFKIMKPLVQHWLDTVANARNHGETGKRPVDMFTEEKPSLQPLPVEPYDIGVVKQARASRQFRVTIDTNRYSVPAQLAGVGLTLKLYPDRLCFYHDNKLVARHVRSYDRRQDYEHPDHPKVLLAQRKKARDQKIFMRFLSLSNKAQQYYRQMEQRRMNPFHHIRQIVALSEIYPPEQVSRAIEDAFHFKAFSCDYIANLLEQRSRQVKEPGALHLTRNSDLLDLTINKPDLSIYNIGGEK

SEQ ID NO: 25 - protein, 491 aa, synthetic construct
MISFETFCQIRDYHQRQHLNAEQIAQALNLHRHTVVKWLNQPHYQAVAQPARASKLDAFKSDIARWLEQHPYSAAQIFQRLRENDYEGGYGIVKQYVRQVRPARSPAYLKLAFAPGECAQVDWGSYGTIPIGSTRRRLSFFVMVLCYSRLMYLEFTVLQTMEHFLNAHENAFQAFAGVPKSLMVDNLKSAVLRRPLAEAPVFNPRYLDLARHFGFTIKPCGVGKGNEKGRVENGVGYVKKNFLHGLELHDLSSLNLAARQWLDTVANVRIHGETRQRPLDLWQVERAQLQPVNPQPFDSALIKTVRASNQFRVSFDGNHYSVPAEYASARVQLKAYPERLCLYAQGKLIARHPRCYDRHQDIEDPDHPRGLLAQRRKAREQKLLARFLTLSPQAEAYYLQLSERRLDARRHIEKIVALSDIYGVDALARALADALHFQAFSSDYIANLLAQRTHYQAAEPVPLHVPRAGDQLELDLPLPDLSLYDDPESDS

SEQ ID NO: 26 - protein, 492 aa, synthetic construct
MLSQRLIFEIHRLSYEGFSLRKIAALLGLSRQVVTKYLRDPAPPTALRPRTSKLDPFRSQIGQFLEIDPAVSGQVILQRLGALGFDGGYTILKDYLRTVRAPRKKAAFIRFESAPGEQCQVDWGHFGVIPYGNTARKLYCLGVIESHSRMLYLEFTHSQGQQALHRGLLNAFRFFGGSPKKLVHDNMKSAVIEREGPLTRFNDAFLAFLRPFKVVPVACNPGQAHEKGKVEKGAMHYIRYNFLPLRSFTNLDDLQAQANQWRDETANTRIHSTTGERPCDRLRKEAMIPLPEFLPDCRDAAQLRVYADFAVHFDGNWYTVPPWAVGRKVSVKADNRTVTVYFKDRPIATHKRSWMRKQRLEMPEHREAARRHKEKYWLSEAAAALLSLGEEVKVYLEELAATGQPLKRSMKKLLALESDYGAQAFIEAIRHATAHRAFGVGYIENILIQNKTPKREHPPVTLSREPLNHIRLIEPSLAEYDALVIKRRKGDR

SEQ ID NO: 27 - protein, 528 aa, synthetic construct
MAGTIKDMSLIKQVIQLKQLGESNRGVSRKLSINKGTVNAYVNIIQCNGLSYDDLLSKDDPELDRLFHAGSPAYSDPRMADFLAKLPYFKEQLSNPKLHVTRQLLYEEYKAGYSHGYGKSQFYFHLQQNLVAQKDCTAVLTETYNPGEKLMVDFAGDKLSYIDTETGEIIKVEVFVACMPYSDYTYVICVPSQKTEDFLFAIRMCMEYLGGVPPILTPDNLKSAVITNDRHEPKLNKALEDMGNHYHFVVLPCDPKEPTQKALVEDKVQTTYNRIYAKLRGRTFYSIVELNRAVWDLLSLFNKTRMQKRPYSREERFHAAEKDKLKQLPQNIYEMKYYANLQVQTNCFVELRQDKVTHFYSVPYIHVGKKALVIFTRSVVNIYINGTQVATHMRSYEYGHTYIKEHLASNCRAIMERSASYYITWASHISPECRNYISEVFNPQRTSQPEEVYYKLCASIMSLSRKYEVAIIDKTCRQCRECKVFSYRKFEAILKHNSLIASEDEPTRCFEAPAPTDHANMRGSNYFK

SEQ ID NO: 28 - protein, 458 aa, synthetic construct
MKSSQSTTAEPAVPTLATIGTWALSLLRLHQRLAPHFARPEVRAHALLYLRAILSEIPRKNGWQIAEHARQAQPYGMQRLLSRAVWDQDGCRDELRSLVTETLSPPPLLPAAAACEPLYPVLVLDESGFPKRGHHSAGVAPQYCGVSGRVDNCQVGVFLSYVTQRGHGLIDRELYVPQEWCADLPRRQAAHIPDTLSFATKPELAQRMVQRAQAARLPIRWVVADTVYGHSSDLRDFLEEQGDAYALAVPSTEVVCVQTRADLLLADVASIAHQALRKEDWHRLSCSLGTKGERRFDWARLPLVHRGEADGRHWLVFRRCLDDPHELAYYLLWAPPDTPLPIMVRAIGARWHIEEDLEVGKDLGLDQYEVRSYLGWYRHITLVLLASAFLLSLCVHANQALPAQALIPLTPSEVCHLLARLIWPAPTSAPLICQWSCWRRTHQYWAGYYHRRRRQKAG

SEQ ID NO: 29 - protein, 488 aa, synthetic construct
MIDRRTVFEIHRLFHEGYGIRKIARTLKLSRDSVNRYLDQPNPPKPVIVRASKLDPFREEIQRLLEKDPTASGSVLFQRLILQGYTGKTSILREYLQEIRPKEKRAYIRFESAPGKQFQVDWGHFDSLLYGKTPRKLYCLAIIEAHSRLLYGEFTHSQKQETLHQALLNAFHFFKGACLELVVDNMATAVTEREGSLIRFNEAFLEFLRPFRIVPRACHPYQPQEKGKIEKGGIHYIRYNFWPLRSFNDLTDVNQQFRHWLDIQANIRIHNTTGERPLDRFKPEALQPLPDFLPDCRETLSVKIHSDFAFRFDGNTYSVPPWAVGKPVIVKADAQTVTVYLREKVLATHTRCWEKRQRIELPAHREAAWKRRPQEWLAVEVSRFISFGEEAKTFLEGLAQTGQSIKKNLAKLLTLHDQYGTSDLIQALKRANVHHAYGAAYVQNILHQEKHPKKIHPPVHLKREDLNRIRLEEPLLAEYDALILKRKE

SEQ ID NO: 30 - protein, 494 aa, synthetic construct
MVMDSKTVDAIYKMRHEQKLSVRQISRQLHVSRKAIRKYLEKPFSLPVMRKPRSSKLDPFKPVIREFLDQCPDASAVVIAQRIRPLGYEGGKSILNEYLSIVRRTKQPERAYVRVESSPGDRFEIDWGHFDAIDYQGDKRKLYAFCCIECHSRRLYVEFTHSQCFETFVRCHIHAFQFMGGRARECLYDNLATAVAEHDGRIIRFNPRFLAFAREMDFYPRACNKAAGWEKGKVEKGGVGYLRHNFWPLRTFADLADVNSQARQWLEEVANKRIHRETRQTPDERFRLECLGPLPPLMPDYRDTASALVHKDIRLCFDGNRYCVHPRYVGLRLTVRADSQSVAIYDQENEVARYVRCWRRGQQFGAERFEKELIEQRPAAQRSAAQRRLVLLLGEVGESYLRNLAETDRSLSRQISELLYLTRQYGPESVIAAIRKAQSVGAFGADYISNILLQEQSARETQPLLRLKDPRLNELATDPLSLLDYDALILNKKE

SEQ ID NO: 31 - protein, 488 aa, synthetic construct
MITRRIVFEIHRLAQEDWTKSHIAEQLALNRQTVTKYLRNPTPERKKLQRPSKLDPFRDDIRAMLERNPRVLGTVIHQRLTAKGYRGGLTILRDFLRSIRPAPRRVFLRFETLPGEQCQIDWGHFGSLRYGDTERRLYCFAIVLSYSRLLYLEFTHSQNQQTLHRCLLNAFRFFNGVPREILTDNMLTAVLEREGSLIRFNEAFLEFLRPFGITPRACNPRQPQEKGKVEKGVIHYIRHNFWPLREFVDLTDLQRQADHWRDTLANCRLHATTAQRPVDRALQEQLRPLPDFLPDCRESAVLKVHTDFCIHFDANTYTTPPWAVGKQVVVKADQQTLSIYLKEKLIATHQRSWERKQRIELPEHREAVLKGMRRQWQSEEVALFASLGEDARLYLEHMAAARLPLRKNVGKLLVLKDRYGLVAFLASLQKALINKAFGAHYIENILVQDHTPTKDHPPLQLKEERLNRIRLEEPNLAEFDAFVLRKGK

SEQ ID NO: 32 - protein, 492 aa, synthetic construct
MIERRTIFEIHRLANEGYSNRKIAHLLHLDRGTVSKYLNDPSPIRKLPKRVSKLEFFYDKIQHLVNIDPKVSAVVVHQRLKPLGFDGGLSIVRDYLRSIRPKQKEAFLRFESKPGHQCQTDWGHFGNLVYGNCSRKLYCLAVIECYSRLLYLEFTHSQRQEALHRGLLNAFTFFGGSPVELVHDNMLTAVLERDGPLVRFNEAFLDFLRPFKIVPVPCNIGQPHEKGKIEKGAIHYIRHNFFPLRSFGDLDDVQTQANQWRDEVANTRIHSTTGERPVDRFQPGSMRALPQPLPDCRDTAAVKVHSDFSVHFDGNTYTVPPWLIGKTVLVKADHHQLAIFFRDKTVAVHNRSWHRRQRVEAAHHRDAARKYRHRQWLSEDVAVLMSLGEETKLYLEHLAASQQSFKKNVAKLLALKEDYGTSALIQAIQRALNHRAYGSDYIENILYQEMTPQRSHPPVKLGNHQALNRIRLQEPSLADYDSLIVKRKKHYE

SEQ ID NO: 33 - protein, 489 aa, synthetic construct
MKSRLTETKPASAAQAAISLKTAYRIENDPRLPSQKSAPRGRRRADPLVAIFDTDIVPMLEAAPGLRPISIFEEMQRRHPQLPDGVRRTMERRIRQWRALKGQDRDVIFRQVQEPGRMGLSDFTEMGDLAVRISGVELDHRLYHFRLACSGFEHVHVILGGESYVALAEGLQNALWALGGAPREHRSDSLSAAFRNLDREARDDLTHRYDALCTHYRMEPTRNNRGVAHENGAIESPHGHLKHSIRDALLMRGSMDFEDLLAYRSFLDEIIGRKNARNSKRIDAERAVLQPLPETRTADYEQALVYVSTSGGFVLRKVFYTVPSRLIRHRLRARLYDDRVELFVGGTRVLNLVRGRPGRDGKHGHVVDYRHVIHALRRKPMALLNLVYRDQLWPRQAYRDMFDHLCKRLSERSACKLMVELLSIAHERTCEGQLALMLSDDLAADRLPQLKELRARFAPDPASLPEVCVQLTPLTLYEALNDSYIGEAA

SEQ ID NO: 34 - protein, 489 aa, synthetic construct
MIDFDLFTRIKNYHEHRGLNSAQIARELGLDPRTVAYWLSQKKFRARKAVQRASKLDPFKDSIIRMLETHPYTGAQILHKIREEGFDGGHTILTDYVRKIRPRRTPAFLKLAFAPGECAQVDWGSHGSIRVGETQRRLSFFLMVLCYSRMMYLEFTVSQTMEHWLSCHQNAFAAFGSVPKRIMVDNLKSAVLKRIIGAAPVFNPKYLDFADHYGFSITPCGVGKGNEKGRVENGVGYVKKNLLAGLDLPDFHAMAPTARHWLDTVANVRVHGETRKKPIEMFQEERASLLPLPPHPYDIGAISQVRASSQFRVSLDSNHYSVPAEYAGSLLTLKTYPDRICLYHGDRLIARHPRSYDRNKDFEDPDHPKQLIAQRRKARDQKIFMRFLALNPKAQDYYRELEKRRMNPRHHVQKIVALTEIYGLELVARAMEDAFFFQAFSCEYIANLCEQRTRTLPEPGALHLTRRSDLLDLEVQQPDLSIYQKQKKD

SEQ ID NO: 35 - protein, 465 aa, synthetic construct
MKLSHHTTPDPGRTTQGAIGRWLMSLNQLHQRLRSYFARPEPYHHALLFLQAVLSEIPRKNGWQIAEHARQLRPYGMQRLLSHATWDQEGVRDELRSLVYQALNPPLSVPEVPASDSPFPVLVIDESGFPKRGQHSAGVGLQYCGRTGRVENCQVGVFLSYVTEQGHALIDRELYLPEDWCADPPRRQAAHIPDFLTFETKPELAQHMIQRAQTAGLPIRWVVADTVYGHSPTLRTFLEAQGYASVLAVPNTEVVCVQTRAGPLLSDVGSIAHDHLRAHDWQRLSQSQGTKGERLFDWAIFPWLQAGIVDGRHFLLIRRCLDPPHELAYYLVFAPPSTPLSTIVQAIGARWHIEEDLQACKALGLSDSEVRSYLGWYRHVTLVLLASAFLVCLCIQEREAGLAGSPSSPGPPLIELSTSEIHHLLARLLFPAPASVPLVDHWSWFRRTHQYWAGYYHRRRRAKAG

SEQ ID NO: 36 - protein, 461 aa, synthetic construct
MKPPEHTTPAQLGPTLRQISRWHEQLRELHARLRSHFARSEAHQHALRYLQAVLSDIPRKNGWQIAEQAREARPFGIQRLLSAAVWDQDAVRDDLRALVRQTLLPAGPPAEPAPFPVLVLDESGFPKRGRHSAGVAPQYCGRTGRVENCQVGVFLSYVTAQGHALIDRELYLPEDWCADTARRQAAHIPEAVRFQTKPELGQQMIERAQAAGLPINWVVADTVYGHSPDLRAFLEDQGLAYALAVPSIEVVCVQTRAGLLLTDVASIAQQAFRAREWQRLSQSLGTQGERLFDWARLPLGQAGTVDGRHWLVVRRCLDDPDELAYYLVWAPPETPLPTMVQAIGGRWRIEEDLQAGKALGLDHYEVRSYLGWYRHLTLVLLAYAFLVSLTVQSHLMASASGEAAASSPLIALSPSEARHLLAHLFWPAPTSAPLICRWSWWRRTHQYWAGYYHRRRRQKAG

SEQ ID NO: 37 - protein, 471 aa, synthetic construct
MKHTQHSTSEQGGPSLGEMGSWLQSLLHLHQHLSPRFARPEVRQHVLLYLQAILSDIPRKNGWQIAEHARQPRPYGMQRLLSRAVWDEEGVRDELRAFVCHTLSPAARVSEQVDSEALFPIVVLDESGFPKRGRHSAGVGPQYCGISGRVENCQVGVFLSYVTALGHALIDRALYLPQDWCADAARRQAAHIPESVRFATKPELAQRMLERTLAAGVPIRWVVADSVYGHSPELRLFLEAQGYAYALAVPSIEVICVQTRDGPLLSEVGSIAHQLRAKDWQRLSMSQGTKGERLFDWALVPWLHGGTVDGRHFLLMRRCLDDPQELAYYLVWAPAATPLCTMVHAVGARWHIEEDLHASKDLGLDHYEVRSYLGWFRHCTLVMLAYAFLVGICVQERSQPVPAPQPDEIVSTGAPTLSALTPSEVQHLLARLIWPLPASVPLVCAWSHFRRLHQYWAGYYHRRRRTKAASS

SEQ ID NO: 38 - protein, 525 aa, synthetic construct
MLTTEQINELHHLYWSERWSIRKIERHLRMGWRTIRKYLESPAQTPPRRPRTSKLDPFKTTIAELLAKDPRVSAAVIGQRLRPLGYDGGASILRHYVHQVRPAATRPQRAFLRMEPNAGERFEVDWGHFGALDYQGDKRKLYGFALVDAHSRMLYLEFTHSQNFETFVRCHIHAFQFLNGTSREIWYDNLATAVAEHEGRLVRFHPRFLGFAREFGFYPRACNPAAGWEKGKVERGGIGYVRQNFWPLRDFTGLDDVNCQARQWLTEVANQRLHQETRQRPVDRFQPDALRPLPAIVPDYRDTAEALVHKDLRMRFDGNRYCVPHRFVGRRLTVKADSSSVAIYHRYQEIVSYARSWRRGQTFGAERFEKELAEYRPAARRSQAQQRLLDFLRGLCVPDLVEAYLRGLADTDRSLARQITELLELVRQYGPDAVAGAITKAHTAHAFGADYVANILRQQQCPRREQPPLRLRDARLNELATDPLSLLDYDTFILESGKEPDDDACRETRSTESGDHEPPTGSDSF

SEQ ID NO: 39 - protein, 491 aa, synthetic construct
MKSPQSTTLLQDEPGSREASGWYQRLRQLHTRLRPHFARREVHQYALGYLQAILSDVPRKNGWQIAEQAREASPSGMQRLLSQAVWDQDAVRDELRTLVKESLLASDAPAQQAPFPLLVLDESGFPKRGQHSAAVAPQYCGVSGQVENCQVGVFLSYVTALGHALIDRELYVPQDWCADLPRRQAVHIPETLTFETKPELGQRMIARAQAAGLPMSWVVADTVYGHSPDLRTFLEEQGFSYALAIPCSEVVAVQSADDRILLGDVGSLVQQALRAKDWQRLSASQGTKGERLFDWARLPVVQVGIADARHWLVVRRCLQEPHELAYYLVWSPAGTPLSLMAQAIGARWHIEEDLHTCKALGLDHYEVRSYLGWYRHLTLVLLAAAFLLSITVQDHLTASAHPESQACPCLIPLTSSEARHLLAHLFWPPPTSAPLICHWSGFRRTHQYWAGYYHRRRRAKAGEIDGSFKPADLPRTSAGKTPRSFPARMPD

SEQ ID NO: 40 - protein, 514 aa, synthetic construct
MERLHMNHLRDLIHRLRAGESERQIARDLRISRPTVHKYHLLAKREGYLETGSALPDDATLLKVLGPGPRPPKSVSSLEPHRGAIENLLKQNVEMTAIWQRLRDNYGYTGSYSAVRRFVSHLEPEAPEAYTRVHTQPGEEMQVDFGSVGQLYDPATGRIRTAYAFVATLGFSRHQYAELVFDQKIATWIGLHRRAFEWFGGVVRRVVPDNLKAAVLDALVYDPVLGEAYRHMALHYGFLISPTRPATPRHKGKVESGVHYVQRNFMAGQEFADIHFANQHLQAWVMEVAGARQHGTTHQPPLRLFREVEQAALLPLPDEPFSLCEIRPVKVHPDCHVVIAGSYYSVPYTCVGQKLDAFVREQVVELYQGQQLVATHLRCQAPGQWQTRLEHYPPHKAAYLQRTPDFCRKTAEQIGPATRQAVETLLADRPLDRLRTVQAILRLEDTVGPQRLEAACARAVYYGDVCYRRIKAILNAALDREPLPDLPPAPLSQPHAFARAGAEFFALAAEVEPC

SEQ ID NO: 41 - protein, 587 aa, synthetic construct
MFKTEIRVKKYLDAPAQSAAPRQRPSKLDPFKPTIAEWLEKDPTATAAVIEQRLRPLGYAGAYTILREYVRATRPARKPPRAFLRMEPPPGERFEVDWGHFGALDYAGDKRKLYAFALVEAHSRMLYLEFTHSQSFETFVRCHVHAFTAMGGVAREIAYDNLATAVAEHDGRLVRFLPRLLAFAREYGFFPKACNPAAGWEKGKVERAIGYARQAFWPLREFTDRHDVNRQARQWLAEIAHQRVHRETRERPIDRFQAETLRPLPVIPYDHRDTVEALVYKDLRLHFDGNRYCVPPRFVGRRLTLKADSASVTIYDRVHEIVSHPRCWRRGQTLGAGRFEAELADLRPAAQRSRAQQRLFAALENLCSQAMLEAYLRHMADTDRALSRQLAEILELVRQYGPEPVAAAIEKASAARAFGADYIANILRQQQSPRHPQPPLRLRDPRLNDLATDPLSLLEYDAFILDSGKEPDDAPGTETESTRPLHHEPLGGDDADMELEARWSSWPRAPIWCSSAILAWARLSWRRSSPGALVRPISACSLPPPWTCSTTCWLGKWVTPWFASGKPTPSRRSSSVMHWATARNARR

SEQ ID NO: 42 - protein, 523 aa, synthetic construct
MLTTDQINDLHRLYWSERWPIRKIERHLRMSWRTIKKYLDAPAQAPAQRQRESKLDPFKPTIAEWLEKDPSVPAAVIEQKLRSLGYRGGHTILREYVHTARPQLKSSRAFLRMEPPPGERFEVDWGHFGVLDYAGDKRKLYAFALVEAHSRMLYLEFTHSQTFETFVRCHAHAFTALGGVAREIAYDNLATAVAEHDGRLVRFLPRFLAFAREYGFYPKACNLAAGWEKGKVERAIGYARKSFWPLREFTDLHDVNRQARQWLAEVANQRLHRETRERPIDRFQASALRPLPVIPYDYRDKVEALVYKDIRLHFDGNRYCVPPRFVGRRLTLKADSSSVTIYDRVNEIVSYPRCWRRGQTFGADRFEAELAQLRPAAKRSHAQQRLFAVLDGYCSQAMLEAYLHDTANTDRALARQLTELLELVRQYGPEPVTAAVEKAAAARAFGADYVANILRQQQSPRQTQPPLRLRDPRLNDLATDPLSLLQYDAFILDSGKESDDSSRTETESTRPIDDEPSRGDDSD

SEQ ID NO: 43 - protein, 406 aa, synthetic construct
ERFEVDWGHFGALDYQGDKRKLYGFALVDAHSRMLYLEFTHSQNFETFVRCHIHAFQFLNGTSREIWYDNLATAVAEHEGRLVRFHPRFLGFAREFGFYPRACNPAAGWEKGKVERGGIGYVRQNFWPLRDFTGLDDVNCQARQWLTEVANQRLHQETRQRPVDRFQPDALRPLPAIVPDYRDTAEALVHKDLRMRFDGNRYCVPHRFVGRRLTVKADSSSVAIYHRYQEIVSYARSWRRGQTFGAERFEKELAEYRPAARRSQAQQRLLDFLRGLCVPDLVEAYLRGLADTDRSLARQITELLELVRQYGPDAVAGAITKAHTAHAFGADYVANILRQQQCPRREQPPLRLRDARLNELATDPLSLLDYDTFILESGKEPDDDACRETRSTESGDHEPPTGSDSF

SEQ ID NO: 44 - protein, 488 aa, synthetic construct
MIDYELFSKIRHLKEHGGLTAPQIATELALDPRTVRKWCATTFRPKKIPQRTSKLDPFKRDIVRMLETHPYTATQIFQRISEQGFDGGYSIVKRYVRKVRPPKSPAFLKLSFAPGECAQVDWGSYGTVNVGSTRRRLSFFVMVFCYSRMMYVEFTVSQTMEHFLGCHQNAFDFFGSLPKKIMVDNLKSAVLRRIVGHAPVFNPKYLDFANHYGFTIVPCNVGKGNEKGRVENGVGYVKKNFLSGLNIPDFSAITPASKNWLDTICNVRIHGETRQKPLDLFEKERSFLSPLPANPFDVATVSQIRASSQFRVTLDANRYSVPAEYAGSRLTIKAYPDRVCVYSKDKLIARHVRSYDRYQDFEDPDHPKELLNQRKKARDQKIFMRFLALSPKAEQYYRRLEQRRMNPHHHVRKIVALSEIHGPDAVARAMEDAFAFDAFSSDYITNLLEQRSRSLPEPSALHLTRREDLLQIKVDQPDMSIYERKHHD

SEQ ID NO: 45 - protein, 488 aa, synthetic construct
MINYELFAKIRHLNEHEGLTVPQIAAELALDPRTVRKWCAATFRPKKMPPRTSKLEPFKRDIVRMLETHPYTATQIFQRISEQGFDGGYSIVKRYVKKVRPPKSPAFLKLSFAPGECAQVDWGSYGAVNVGSTRRRLSFFVMVLCYSRMMYVEFTVSQSMEHFLGCHQNAFDFFGSVSKKIMVDNLKSAVLRRIVGYAPVFNPKYLAFANHYGFSIAPCNVGKGNEKGRVENAVGYVKKNFLSGLTIQDFSAIGPAAKNWLDTIANVRIHGETRQKPLDLFEKERLFLTPLPTNPFDVATVSQVRASSQFRVTLDTNRYSVPAEYAGTRLTIKTYPDRLCVYSKDKLIARHVRSYDRYQDFEDSDHPKELLRRRKKARDQKIFMRFLALSPKAEQYYRKLAQRRMNPHHHVRKIVALSEIYHPDAVARAMEDAFAFDAFSSDYITNLLEQRSRSLPEPGALHLTHREDLLKIKVDQPDLSIYERSHHE

SEQ ID NO: 46 - protein, 507 aa, synthetic construct
MSGNGVSNRQIAKDLDINKETVNNYVRFFNLDPLTLKQALAMEDPELEARFRAGNPAYTDYRHQTFLDELPHFKASLGHKHVTRFLVWQEYIAKHPNGYRKTQFFHHLKQQLAAAKPTTVLSGTYVPGEKLFVDFAGDTMEYVNTETGEITKVQVFVACLPYTDYAFAMCIPSQRTEDFLHAISKCLEAIGGVPKILVTDNLKSAVIKADRYEPTLNKALEDMGNHYRFVTIPCRPYSPTHKALVENQVKIVYRRVYAKLRNTTFYSLEDLNEAVSQKMLEHNQTRMQQRPYSREEQFFAVEQDTLSPLPEQPYEMKFTCNLQVRNDGLVCLARDKHYYSVPFIHIGKRSHIIYTRTFVKIFVNNELVATHERRVGFGHTYLKEHLASNSNAFLCRSPEYYQAKADKHSAAFKQLVSDMFLDLEQRQIPPEFKYKTCDYMLSIGRKTPVADFEQACRIAIQNRSYSGKFLQNVVNNLNVAKSLAQAGERINPQPTNHENMRGNAYYK

SEQ ID NO: 47 - protein, 489 aa, synthetic construct
MIDYETYVRIRNYFTNDGLKYSQIADELGLDCRTVAKWANETRYLPRRSAKRISKLDPFKNEIVRMLEKHPYTARQIFQRLQEGGFDGGITILTDYVRKIRPPKVRPYLKLVFAPGECAQVDWGTYGNVRVGSTSRRLSFFIMVLCHSRMMYVEFTVSQTMEHFLGCHQNAFHFFGSVPQKIMVDNLKSAVLKRTIGKDPVFNPRYMDFANHYGFKIVACNVGKGNEKGIVENAVGYVKKNLLNGLAITDFKIMKPLVQHWLDTVANARNHGETGKRPVDMFTEEKPSLQPLPVEPYDIGVVKQARASRQFRVTIDTNRYSVPAQLAGVGLTLKLYPDRLCFYHDNKLVARHVRSYDRRQDYEHPDHPKVLLTQRKKARDQKIFMRFLSLSNKAQQYYRQMEQRRMNPFHHIRQIVALSEIYPPEQVSRAIEDAFHFKAFSCDYIANLLEQRSRQVKEPGALHLTRNSDLLDLTINKPDLSIYNIGGEK

SEQ ID NO: 48 - protein, 489 aa, synthetic construct
MIDYEAFMKIKSYHEKDGLNCNQIAAIMGLSFKTVNKWLNEKRYRMRKSAGLSSKLDPFKNQIIQMLEKYPYTAAQILLRIKDNGFDGGYTIVKDYVRKVRPPKTRAFLKLSFAPGECAQVDWASYGSVNVGSTRRRLSFFVMVLCYSRMMYVEFTVSQTMEHFLACHQNAFNFFDSVPKKIMVDNLKSAVLSRIVGQAPVFNPKYLDFANHNGFTIAPCNIGKGNEKGRVENAVGYVKKNFLAGLDIPDFTAVNPAARHWIDTVANVRIHGETRKKPIELFKEERPCLNGLPENPFDIATVSQVRASSQFRITIDTNRYSVPAEYAGRRLTLKTGPDRLCVYCNDKLIARHVRSYDRYRDFEDPDHPRQLLARRKKARDQKIFMRFLTLSSKAEQYYCKLEQRRMNPYHHVRKIVALSEIYPLESVARAMEDAFAFQAFSCEYIANLLEQRTRCLPEAGALHLTRREDLLDIKIEQPDLTIYERKDHD

SEQ ID NO: 49 - protein, 489 aa, synthetic construct
MIDYELYCKLRHLKNQEGLSAHQIAGELAMDPRTVAKWLARERFCQRKASPRASKLDPFKAEIARLLESHAFSAVQILLRLREQGYTGGYSIVKDYVRAIRPSKSRAYLTLAFAPGECAQVDWGCYGAVAVGNTRRRLSFFGMVLCYSRMLYLEFTVSQSLEHFLACHQNAFDFFGSVPKKIMVDNLKSAVLRRVLGRPPVFNPRYLDFAHHYGFTIAPCNVGRGNEKGRVENAVGYVKKNFLAGLQIPDFAALGPAARNWLETVANVRLHGETRQKPVELFEAERSCLLPLPVNGFDIATVSPLRASSQFRITIDTNRYSVPAEYAGRALTVKTDPERICVYAGEKLIARHIRSYERYQDFEDPDHPKALLAQRKKARDQKIFMRFIALSQKADLYYRKLAERRLNPQQHVRKIVALSEIYGTEPVARAIEDAFIFEAFSCEYIANLLQQRARFHKEPAALHLTRREDLLDIRLEHPDLSIYERKTDE

SEQ ID NO: 50 - protein, 460 aa, synthetic construct
MKHSQHTTLQPIEPSLGTIGGWVLSLHQLHQRLVPRFARPEAHQHALLYLQAILSDIPRKNSWQIAEQARQARPYGMQRLLSQAVWDEDGVRDDLRALVCQTLHPPPLLPASLASAQVFPVLVIDESGFPKRGRHSAGVGPQYCGLTGRVENCQVGVFLSYVTERGHALIDRELYLPEDWCADLPRRHAAHIPDSVSFVTKPELGQRMIQRAQAAGLPIGWVVADTVYGHSPDLRTFLEEQGYAYALAIPSIEVVCVQTRAGLLLRDVGSLAQHAVRAREWQRLSQRLGTKGERLFDWARLPVVHGGTVDGRHFLVIRRCLDNPNQLAYYLVFAPPDTPLSTMVQAIGARWHIEEDLQASKDLGMDHYEVRSYLGWYRHITLVLLAYAFLLSLCVPVPRPLPSQPLIALTPSEVRHLLSHLIFPAPTSAPLICHWSRFRRTHQYWAGYYHRRRRQKAWPA

SEQ ID NO: 51 - protein, 523 aa, synthetic construct
MAGKSTNMSRIKQVLQLSGNGVSNRQIAKDLDINKETVNNYVRFFGSDPLSLKEVLKMEDPELEARFRAGNPAYTDYRHQTFLDELPDFKTSLGHKHVTRFLVWQDYIAKHPDGYRKTQFFHHLKQQLAAATPTTVLSDTYVPGEKLFVDFAGDTLEYVNTETGEMIKVQVFVACLPYTDYAFALCIPSQRVEDFLYAISKCMDAIGGVPKILVTDNLKSAVIKADKYEPTLNKALEDMGNHYRFVTIPCRPYSPTHKALVENQVKIIYRRVYAKLRNTAFYSLEDLNEAVWQKMLEHNQTRMQQRPYSREEQFFAVEKNALSPLPEQPYQMKFTCDLQVRNDGFVYLARDKHYYSVPFVHIGKRSHVIYTRTLVKIFVNNEVVATHERHLGFGHTHKNEHLASNSNAILNRSPEYYQEKADKHSAVFKQLVSDMFLDLEQRQIPPEFKYKTCDFMLSIGRKTPMADFEQACQIAIQNRSYSGKFLQNVISNLNVAKSQSESKERINPQPTNHENMRGNSYYK

SEQ ID NO: 52 - protein, 523 aa, synthetic construct
MLDTEQINDLHRLYWSERWSIRKIERHLKMGWRTIRKYLKAPAQGPALRSRSGKLDSFKGNIAEWLEKDPQVTAAVMEQHLRPLGYSGGASILQEYVRKVRPQLAPRRAFVRMEPVAGERFEVDWGHFGALTYEGDTRKLYAFALVDAHSRMMYVEFTHCQSFETFARCHVHAFTELGGVARQIAYDNLATAVAEHDGRLVRFHPRFLGFAREFNFFPHACNPASGWEKGKVERAIGYLRQNFWPLREFADLHDVNRQVRQWLSEVANRRLHGETRERPLDRFKPEALRPLPIIPYDYRDLTEALAHKDLRLPFDGNRYCVPHRYVGRRLTIKADSGAVAIYDRVEEVVSDARSWRRGQTFGAERFEKLLAEQRPAARRSQAQQRLLDSLDGVCLRATVEAYLRDMADTDRSLSRQIRELLELIRQYGPEDVADAIGKAATARAYGADYVANILRQQRSPRRPQPPLRLRDPLLNELATDPISLLEYDAFILESGKEPDDPSRTETTATEPESDEPADRGDDR

SEQ ID NO: 53 - protein, 512 aa, synthetic construct
MNYLRDLIYRLRQGDSERRIAQDLRVSRPTVHKYKLWAEANGYLEPSQPLPELAELLAALGPAPQPPQMTSSLVPYQAVVEQLLDQNVELTAIWQRLHDNHSYQGSYSAVRRFVQRLRPHQPDVFVRVQSPPGEELQVDFGNVGLLFDPISGRLRPAYVFVATLSYSRHQYAELVFDQKIPTWLALHRRAFESFGGVPQRVVPDNLKAAVLQVLVHDPVLGEAYRRLALHYDFLISPTLPGTPRHKGKVESGVHYVQRNFLAGQEFVDILVANQRLWRWVREVAGTRIHGTTRQAPLRLFADYEQAALQPLPATPFSLQQIKPVKVHPDCHVVLEGSYYSAPYGYVGQTLDAYVSEQLVELYAGVELVASHLRCTDAGQWQTRLEDYPPEKGAYLIQTPLYCRRWAAQVGPATSQVVETLLAEKPLQRLRAVQAILRLQESVGPDRLEAACARALFYGDVHYRRIKQILNAALDREPLPEPSSAPVSPPPRLFAFARSGVDFFPPEAEVRPC

SEQ ID NO: 54 - protein, 489 aa, synthetic construct
MIDYELFCKIRHLKDHEGLSAHQIAGELAMDPRTVVKWLARERFCQRKAVPRSSKLDPFKAEIARLLQTHAFTAAQILMRIREQGFTGGYSIVKDYVRSIRPPKSRAYLTLAFAPGECAQVDWGCYGSVAVGNTRRRLSFFVMVLCYSRMLYLEFTVSQSLEHFLACHQNAFDFFGSVPKKIMVDNLKSAVLKRILGRPPVFNPRYLDFANHYGFTIAPCNVGRGNEKGRVENAVGYVKKNFLSGLEIPDFAALGPAARNWLEAVANVRLHGETRQKPVELFEAERPCLLPLAINAFDIATVSQQRASPQFRISCDTNRYSVPAEYAGRALTVKTDPERICVYAQDKLIARHIRSYERNLDFEDPDHPKALLAQRKKARDQKIFMRFIALSPKADLYYRKLAERRLNPQQHVRKIVALSEIYGTDPVGRAIEDAFIFEAFSSEYIANLLQQRARFHKEPAALHLTRREDLLDIRLEHPDLSVYERNTDE

SEQ ID NO: 55 - protein, 489 aa, synthetic construct
MIDYETYVRIRNYFSNDGLKYSQIADELGLDCRTVAKWASEERYLPRRSAKRASKLDPFKNEIVRMLERHPYTARQIFQRVQERGFEGGITILTDYVRKIRPPKVTPYLKLVFAPGECAQVDWGTYGNVRVGSTSRRLSFFIMVLCHSRMMYVEFTVSQTMEHFLGCHQNAFHFFGSVPQKIMVDNLKSAVLKRTIGKDPVFNPRYMDFANHYGFKIVPCNVGKGNEKGIVENAVGYVKKNLLNGLAITDFKIMKPLVQHWLDKVANVRKHGETGKRPVDMFTEEKPSLQPLPVEPYDIGVVKQVRASRQFRVTIDTNRYSVPAQLAGVGLTLKLYPDRLCFYHENKLVARHVRSYDRRQDYEHPDHPKVLLAQRKKARDQKIFMRFLSLSNKAQDYYRQMQQRRMNPFHHIRQIVALSEIYPPEQVTRAIEDAFHFKAFSCDYIANLLEQRSRQVKEPGALHLTRSSDLLDLTINKPDLSIYDIGGEK

SEQ ID NO: 56 - protein, 352 aa, synthetic construct
RLSFFALVLCHSRQLYVEFTLGQSQEQWLACHERAFEYLGGVPAEIMVDNCKTAVLAHAPGTGPVFNPTYVDFARHYGFTIKACAPRRPQQKGRIENGVGYIKKNFLAGLELTDFAPLNPAARVWLDTVANVRLHRETQRRPVDLFIEEKPKLRALPLAAYDAALIRPVRATNRCRVVVETNRYSVPPACAGQLLTLKLSAEKLRLFRGDQWIAEHPRSYEKHQDFEQPDHVQTLLHERGEARHQKLLLTFLGFSAHAPAYHEQLAERRLNLRHHVQKIVALAEIYGASAIGRALDDAHALGAYSCEYIANLLEQRQRLVPAAPGALHLTRASDLLELELPLPDLSPYHSAP

SEQ ID NO: 57 - protein, 463 aa, synthetic construct
MKPLQSITSEPTLGTIGVWAESLHRLHQRLEPHCARPEVRAHALLYLQAILSEIPRKNGWQIAEHARQRHPYGMQRLLARAVWDEDACRDELRALVCQTLFPPPLVPAVADAEPLYPVVVLDESGFPKRGKHSAGVAPQYCGVTGQVENCQVGVFLSYVTALGHALIDRELYLPDDWCADLPRRHAAHIPDPVRFQTKPELAQVMLQRAQAAGLPLRWVVADTVYGHSPDLRRWLEDHSCAYALAVPSIEVVWAHTRSGSRLSDVGSLAHQALREQDWQRLSQSLGTKGPRLFDWARLPLLQGDAPDGCHWLVVRRCLEEPRELAYYLVVAPPATPLPTMVQAIGARWRIEEDLQAAKDLGLDQYEVRSYGGWYRHITLVLLASAFLVTLCVQENCPPPVSVAFSPHARVALTPSEVRHLLARLIFPAPTSAPFVWQWSRFRRTHQYWAGYYHRRRRTKAAAV

SEQ ID NO: 58 - protein, 491 aa, synthetic construct
MIDYQTFCQIRQLRDTEHLTITQIARQLGLHWQTVAHWEKRPRYERRAAAAVTRRVGKLDAFKPAIQRLLATHAFSAAQLFTRLREQGYTGRYSILKVYVRQIRPSQTAAFLTLHFAPGQCAQVDWGSWGSIRVGHAQRRLSFFALVLCHSRQLYVEFTLGQSQEQWLACHERAFEYLGGVPAEIMVDNCKTAVLAHAPGTGPVFNPTYVDFARHYGFTIKACAPRRPQQKGRIENGVGYIKKNFLAGLELTDFAPLNPAARVWLDTVANVRLHRETQRRPVDLFIEEKPKLRALPLAAYDAALIRPVRATNRCRVVVETNRYSVPPACAGQLLTLKLSAEKLRLFRGDQWIAEHPRSYEKHQDFEQPDHVQTLLHERGEARHQKLLLTFLGFSAHAPAYHEQLAERRLNLRHHVQKIVALAEIYGASAIGRALDDAHALGAYSCEYIANLLEQRQRLVPAAPGALHLTRASDLLELELPLPDLSPYHSAP

SEQ ID NO: 59 - protein, 528 aa, synthetic construct
MAGTIKDMSLIKQVIQLKQLGESNRGVSRKLSINKGTVNAYVNIIQCNGFNYDELLSKDDPELDRLFHAGSPAYSDPRMADFLAKLPYFKEQLGNPKLHVTRQLLYEEYKAGYPHGYGKSQFYFHLQQNLIAQKDCTAVLTETYNPGEKLMVDFAGDKLSYIDIETGEIIKVEVFVACMPYSDYTYVICVPSQKTEDFLFAIRMCLEYLGGVPPILTPDNLKSAVITNDRHEPKLNKALEDMGNHYHFVVLPCDPKEPTQKALVEDKVQTTYNRIYAKLRGRTFYSIVELNRAVWDLLSLFNKTRMQKRPYSREERFHAAEKDKLKQLPQKIYEMKYYANLQVQTNCFVELRQDKVTHFYSVPYIYVGKKALVIFTRSVVNIYIDGTQVATHMRSYEYGHTYIKEHLASNCRAIMERSASYYITWASHISPECRNYISEVFNPQRTSQPEEVYYKLCASIMSLSRKYEVAIIDKTCRQCRECKVFSYRKFEAILKHNSLIASEDEPTRCFEAPIPKDHANMRGSNYFK

SEQ ID NO: 60 - protein, 496 aa, synthetic construct
MEVTMIERRVIFEIHRMADSGLSIRRIAKALHLDRETVSKYLADPNPARATVVKPSKLDAFKDQIHELLEKDREVSATVIHQRLKVQGFDGEISILRDYLRKVRPKPKEAFIRFESQPGVQVQLDWGHFGSLSYGTTLRKLYVLAVIECHSRMLYLEFTHSQRQETLHRALLNAFRFFGGTPAELVHDNMLTAVTERDGPLVRFNDAFLDFLRPFHVVPIPCNVGQAHEKGKVEKGAIHYIRHNFWPVRCFKDLHDVQAQAEGWRDEVANRRVHATTGERPVDRFKPEAMRPLPDILPDCRDAAPAKVHSDFSITFDANTYSVPPWLVGRSVMARADNKTLTVYFKEKAVATHQRSWGRKERIESPHHVDAARRSRNLKWLSEDTATLMSLGEEAKVYIEHMAATRAPLKKNVQKLLALKDEYGSSALLDAMRRALTHRAYGADYIENILYQDMTPKRIHPPVKIQNREALNRIRLQEPNLADYDATALKRRNHHD

SEQ ID NO: 61 - protein, 514 aa, synthetic construct
VIDIREVLRRLRLGEPERRIARELDLSRNTVAGYRRWAQAHGLLTGALPDAAQLAALLHPPEDERPAPEQSSVAPFRDQVLAWRQQGVEGQAIFHLLVEQHGFAGSYSAVKRFLRRLAPATPRATVRIETAPGEEAQVDFGTAGLMRDPDSGRLRRAWAFVMTLSYSRHLYVEFVFDQTVATWCRCHRAAFEWFAGVPRRLVIDNLKAAIVRAVLYDPEVQRVYRELAEHYGFLIAPCRPRMPEHKGKVEQGGVHYVKRNCLAGRAFRDLPDGNRHALRWCLETAGLRCHGTIKQQPLVLFETVERAALLPLPATPWAPVTWKPAQLPPDCHGVFQGAYYSAPPRVIGQRLWVRATLTQVQCVHAHALVAMHLPARPGQRRTLHAHLPPDTVHCLMQTPVWCQTRAAEIGPTCAAFIAAVLGDRPLDRLRSAQGILRLAQRYGAPRLEAACARALAGGEYRYHTVKAILAHDLDRQPLLDLAAPAPRALPAPRHARPWTTFFPDPSAEGGSPWN

SEQ ID NO: 62 - protein, 492 aa, synthetic construct
MLSQRLIFEIHRLSYEGFSLRKIAALLGLSRQVVTKYLRDPAPPKALRPRPSKLDPFRSQIGQFLEIDPAVSGQVILQRLRALGFAGGYTILKDYLRTVRAPRKKAAFIRFESAPGEQCQVDWGHFGAIPYGNTARKLYCLGVIESHSRMLYLEFTHSQGQQALHRGLLNAFRFFGGSPKKLVHDNMKSAVIEREGPLTRFNDAFLAFLRPFKVVPVACNPGQAHEKGKVEKGAMHYIRYNFLPLRSFTNLDDLQAQANQWRDETANTRIHSTTGERPCDRLRKEAMIPLPEFLPDCRDAAQLRVYDDFAVHFDGNWYTVPPWAVGRKVSVKADNRTVTVYFKDRPIATHKRSWMRKQRLEMPEHREAAKRHKEKYWVSEAAAALLSLGEEVKVYLEELAATGQPLKRSMKKLLALESDYGAQAFLEAIRHATAHRAVGVGYIENILIQNKTPKREHPPVTLSREPLNHIRLIEPSLAEYDAFVIKRRKGGQ

SEQ ID NO: 63 - protein, 492 aa, synthetic construct
MIDYETYVQIRNYFENEGLKYSQIAQALDLDCRTVARWANEKRYQPRKFTLRKSKLDPFKNDIIRMLEKHPYTATQIYQRIKQNGFDGGSTIVEDYVRKIRPPRSKAFLKLVFAPGECAQVDWGSYGSVRVGSTRRRLSFFVMVLCHSRMMYVEFTVLQTMEHFLGCHQNAFQYFGALPQKIMVDNLKSAVLKRIMGQPPVFNPKYLDFAKHYGFTIAACNVGKGNEKGVVENGVGYVKKNLLNGLDITDFKIMQPATQHWLESVANVRTHGQTGQKPVDMFAKEKIFLQPLPHEPYDIGVVRQMRASRQFRLTIDTNHYSVPAQLAGVRLTVKLYPDRICFYHDNNLVARHVRSYDRHCDFEHPDHPKALLQQRKKAQDQKIFIRFLSLSDKAQQYYRQLEQRRLNPFHHIRQIVALSEIYGNEAVARAIEDAFSFAAFSCEYIANLLEQRSRRVKQPGALHLTRSSDLLDLTIDHPDLSIYTINGDDNHE

SEQ ID NO: 64 - protein, 505 aa, synthetic construct
MNHIQDIIRRLQLGEGERRIARDMNISRGTVRKYHEIAKQGNYLEKLGDLPSDSVLREVLGPGVQVPRQISTVEPYREKIQEWRKQGVEMTAIWLRLQENYGYKGGYSSIRRFVHRLEPIEPEVFIRVHSEPGEDMQVDFGTVGQLYDPVAKRLRTAYVFVATLGYSRHQYAELVFDQKIATWIALHKRTFEYFGGVPRRVIPDNLKAAVLQAVAHDPILGEAYRRMALHYGFLISPTIPFTPRHKGKVESGVHYVKRNFYAGQEFMDIQIANVHLRDWILNTAGVRKHGTTSEAPLHLFHETEKTCLQPLPMQPFKLLDIHLVKVHPDCHVVIGKSFYSVPFGYVGQELAAHVSENFVEIYHELDLVTTHPRSTQPGQWQTRVEDYPPAKAAYLIRTPLYCKKLAAKIGPATQSVVEQLLADRPLDRLRSVQAILRLEESVGSKRLEAACARAAHFGDVRYRQIKLILNAALDREPLPQSQLAKPAATSHTFARSGEEFFGVSL

SEQ ID NO: 65 - protein, 537 aa, synthetic construct
MIAGMLTRERAKLWHNSYKRKSLEEKIMERMHMNHLRDLIRRLRAGESDRRIARDMQISRPTVQKYHALAKKEGYLETGTEIPDDEKIQNVLGPGPRPPKIASSVEQFGEIVKKLRKQGVEMVAIWQRLRDNYGYSGSYSAIRRYVHQLEPKEPEVYARVQTAPGQEMQVDFGEVGQLYDPASGTIRTAYVFVATLSYSRHQYAELVFDQKVVTWIGLHRRAFEYFEGVPARVVPDNLKAAVQKILIHDAILGEAYRKMALHYGFMISPTIPYTPRHKGKVENGVHYVQRNFIAGQEFADIHCANQHLRNWIRDTAGVREHGTTHEAPLSLFKEFEQAALLPLPETAFSLCEIRVAKVHPDCHVVVSGSYYSVPYVYVGKKLDVYVHEKTIELYQGQKLVTTHLRCLIPGGWQTRLEHYPEQKAAFLQRTPDFCRQIAARLGPATSKVVNSLLAERPLDQLRSVQAILRLEETVGAQRLEAACARAVHYGDLRYRRIKEILNAALDREPLPVTAPLQPKTAHTFARATTDFFAPVQP

SEQ ID NO: 66 - protein, 496 aa, synthetic construct
MVLDPKRINDIYRLHHDEKWSVRKIARVLHLARKSIRKYLRSPAGSPATRKPRKTKLDPFKPTVRELVERDPEASAVVIFDRLRPLGYTGQITILRDYLKTVRQAAHPPRAFVRVESSPGDRFEVDWGHFGALSYDGDQRKLYAFCLIECHSRRLYVEFTHSQSFETFVRCHIHGFGFMTGVARECLYDNLPAAVAEHEGKIVRFNPRFLAFAREYDFYPRACNKGAGWEKGKVERGGVRYLRQNFWPLRDIRDLHDANRQVREWLEQTANVRIHSETRERPNDRFRPDALRPLPQLDSDYRDTVIARLHKDIRLRFDGNRYCVSPRLVGHQLTLRADSSSVTIYEQKREIARYARSFRRGQTFGAERFEKELLGQRPGAERTHTQQRFIALVGPIGETYLRALAETDRSTARQLRELLALVRQYGPEAVAAAITKAHAAGAIGADYVANLLLQSRSPREQQPPLQLKDDHLNELVTDPLSLLEYDAFILSQRSTP

SEQ ID NO: 67 - protein, 569 aa, synthetic construct
LPTTTQLRRKSGFWKHFRPAAVPRSNLANNNVLARIRFLPDKGNRAMLSTEQINDLHRLYWSERWPIRKIERHLRMGWHTIRKYLDAPAQGPATRQRTSKLDPFKATISEWLEKDASVTGTVIEQRLRPLGYSGGPTILRDYLKKTRPQAKPSRAFIRMEPTPGERFEVDWGHFGALDYSGDQRKLYAFALVEAHSRMFYLEFTHSQSFETFVRCHMHAFVALGGVAREIAYDNLATAVAEHDGRLVRFLPRFLGFAREYGFYPRACNLAAGWEKGKVERAIGYTRQSFWPLREFTDLDDVNRQARQWLSEVANQRQHRETRQRPRDRFQPAALKPLPVLPYDYRDSVELLVHKDLRVQFDANRYCVPPRYVGRRLMVKADSSSVTIYDRVNEIVSYPRSWRRGQTFGADRFEAELADLRPAARRSRAQERLFRFLDGLCSKAMVEAYLRDLADTDRALSRQLTELLELIRQYGPEAVANAIEKASAARAFGADYVANILRQQQCPRRPQPPLVLRDPLLNELATDPLSLLEYDAFILTPGKESDDTPRTKAEPTESVHHEPPTGDDSD

SEQ ID NO: 68 - protein, 477 aa, synthetic construct
MFIRNENCMKPQHHTTWDGAGPSSGEIGRWPLALIHLHQRLAPYFARPEPRQHALLYLQAMVSEIPRKNSWQIAEHAKQARPYGMQRLLSRAVWNDAGVRDELRTYVVQCLSPPSLPQIGKQTRDGPQPLFPVYVIDESGFPKRGTHSAGVQVQYCGATGQLDNCQVSVFLSYVTAQGHALIDCELYLPEDWINDAARRQATHIPETAVFQTKPELARQMLQRVQSASLPIRWVAADTVYGHSTDLRLWLEGQGLFFALAVPANEVVCVQTSQGYRIGDVASIEQQALGKEDWQRLSMSQGTKGERLFDWAILPQVLHGTVDGYHWLVIRRCLDAPFEKAYYLVFAPPGTSLHTMVLAIGARWSIEVDLENAKDLGLDQYEVRSYVGWYRHITLVMLASAFLLGICAQDHRHHPQQEGPMPSPPLIPLTTSEVRHLMARLIWPAPSHAPLICQWSCWRRAHQYWAGYYHRRRRLKAG

SEQ ID NO: 69 - protein, 492 aa, synthetic construct
MIDYSTFLQIKHLHQDKRLKCSQIAKELSLDERTVSKWLSENQYHQRKPVQCSSKLDPFKADIVRMLETHPLSAAQVLQRIREDGFDGGYTIVKEYVRRVRPRRKKAYLTLSFAPGECAQVDWGSYGSVNVGDTSRRLSFFVMVLCHSRMMYVEFTVSQTMEHFLSCHQNAFLRFGGIPERIMVDNLKSAVLKRTVGKDPVLNPKYLDFANHYGFAIAPCGVGKGNEKGRVENGVGYVKKNFLSGLQIGDFKDLNPAALGWLDTIANVRVHGATGSKPVDMFQQERPHLHRLPAHPYDIATICQVRASRQFRVVLDTNRYSVPAELAGQSLTMKTYPDRLCLYHQEQLVARHVRSYDRRKDFELPDHPKALMAQRKKAQDQIIFRNFLALHPKADDYYRQLEQRRMNPLHHIRQIVALSDIYGKDQVARAIEDAFTFRAFSCEYIANLLEQRNRKPTEPGPLHLTRRQDLLELDLDEPNIDIYSRFAPGESQ

SEQ ID NO: 70 - protein, 489 aa, synthetic construct
MIDYELYCKLRHLKNQEGLSAHQIAEELAMDPRTVVKWLARERFCPRKASPRASKLDPFKAEITRLLESHAFTAAQTLMRIREQGYAGGYSIVKDYVRAIRPPKSRAYLTLAFAPGECAQVDWGSYGSVAVGSTRRRLSFFVMVLCYSRMLYVEFTVSQSLEHFLACHQNAFDFFGCVPKKIMVDNLKSAVLKRILGRPPVFNPRYLDFANHYGFTIAPCNVGRGNEKGRVENAVGYAKKNFLAGLEIPDFAALGPAARNWLETVANVRLHGETRQKPVELFNAERPCLLPLPANAFDIATVSQQRASPQFRISCDTNRYSVPAEYAGRALTVKTDPERICVYAGDKLIARHIRSYERYQDFEDPDHPKALLAQRKKARDQKIFMRFIALSQKADLYYRKLAERRLNPQQHVRQIVALSEIYGTDPVARAIEDAFIFEAFSSEYIANLLQQRARFHKEPAALHLTRREDLLDIRLEHPDLSVYERKTDE

SEQ ID NO: 71 - protein, 496 aa, synthetic construct
MVMDPKTVDAIYRMSHEQQLSVRQISKQLHVSRKAIRKYLGKPIPIPVMRKQRSSKLDPFKPIIREFLDQCPTASSVVIAQRIRPLGYEGGKSILNEYLSIVRQTKQPERAYVRVESSPGDRFEIDWGHFDSIDYQGDKRKLYAFCCIECHSRRLYVEFTHSQCFETFVRCHIHAFQFMDGHPRECLYDNLTTAVAEHDGRIVRFNPRFLAFAREMNFYPRACNKAAGWEKGKVEKGGVGYLRHNFWPLRTFADLADVNSQVRQWLEEIANKRIHRETCQSPDERFRPECLGPLPPLMPDYRDTANALVHKDIRLCFDGNRYCVHPRYVGLRLTVRADSQSVAIYDHDNEVARYVRCWRRGQQLGAERFEKELIEQRPAAQRSAAQRRLILLLGEVGESYLRNLAETDRSLSRQISELLSLTRQYGPESLIAAIRKAQSVGAFGADYISNILMQEQSAREMQPLLRLKDPRLNELATDPLSLLDYDALILKQRSES

SEQ ID NO: 72 - protein, 492 aa, synthetic construct
MLSQRLIFEIHRLSYEGFSLRKIAALLGLSRQVVTKYLRDPAPPKALRPRPSKLDPFRSQIGQFLEIDPAVSGQVILQRLRALGFAGGYTILKDYLRTVRAPRKKAAFIRFESAPGEQCQVDWGHFGAIPYGNTARKLYCLGVIESHSRMLYLEFTHSQGQQALHRGLLNAFRFFGGSPKKLVHDNMKSAVIEREGPLTRFNDAFLAFLRPFKVVPVACNPGQAHEKGKVEKGAMHYIRYNFLPLRSFTNLDDLQAQANQWRDETANTRIHSTTGERPCDRLRKEAMIPLPEFLPDCRDAAQLRVYDDFAVHFDGNWYTVPPWAVGRKVSVKADNRTVTVYFKDRPIATHKRSWMRKQRLEMPEHREAAKRHKEKYWLSEAAAALLSLGEEVKVYLEELAATGQPLKRSMKKLLALESDYGAQAFLEAIRHATAHRAVGVGYIENILIQNKTPKREHPPVTLSREPLNHIRLIEPSLAEYDAFVIKRRKGGQ

SEQ ID NO: 73 - protein, 489 aa, synthetic construct
MIDYELYCKLRHLKNQEGLSAHQIAEELAMDPRTVVKWLARERFCPRKASPRASKLDPFKAEIARLLQAHAFTAAQTLMRIREQGYAGGYSIVKDYVRAIRPPKSRAYLTLAFAPGECAQVDWGSYGSVAVGSTRRRLSFFVMVLCYSRMLYVEFTVSQSLEHFLACHQNAFDFFGCVPKKIMVDNLKSAVLKRILGRPPVFNPRYLDFANHYGFTIAPCNVGRGNEKGRVENAVGYAKKNFLAGLEIPDFAALGPAARNWLETVANVRLHGETRQKPVELFNAERPCLLPLPANSFDIATVSQQRASPQFRISCDTNRYSVPAEYAGRALTVKTDPERICVYAGDKLIARHIRSYERYQDFEDPDHPKALLAQRKKARDQKIFMRFIALSQKADLYYRKLAERRLNPQQHVRQIVALSEIYGTDPVARAIEDAFAFEAFSSEYIANLLQQRARFHKEPAALHLTRREDLLDIRLEHPDLSVYERKTDE

SEQ ID NO: 74 - protein, 492 aa, synthetic construct
MLSQRLIFEIHRLSYEGFSLRKIAALLGLSRQVVTKYLRDPAPPTALRPRPSKLDPFRSQIGQFLEIDPAVSGQVILQRLRALGFAGGYTILKDYLRTVRAPRKKAAFIRFESAPGEQCQVDWGHFGAIPYGNTARKLYCLGVIESHSRMLYLEFTHSQGQQALHRGLLNAFRFFGGSPKKLVHDNMKSAVIEREGPLTRFNDAFLAFLRPFKVVPVACNPGQAHEKGKVEKGAMHYIRYNFLPLRSFTNLDDLQAQANQWRDETANTRIHSTTGERPCDRLRKEAMIPLPEFLPDCRDAAQLRVYDDFAVHFDGNWYTVPPWAVGRKVSVKADNRTVTVYFKDRPIATHKRSWMRKQRLEMPEHREAAKRHKEKYWVSEAAAALLSLGEEVKVYLEELAATGQPLKRSMKKLLALESDYGAQAFLEAIRHATAHRAVGVGYIENILIQNKTPKREHPPVTLSREPLNHIRLIEPSLAEYDAFVIKRRKGGQ

SEQ ID NO: 75 - protein, 492 aa, synthetic construct
MIDYPTFIRIKHLHQDKGLNRSQIAKELSLDERTVASWLNEDQYHQRKPVQRSSKLDPFKADIIRMLETHPYSAAQVLQRTREQGFDGGYTIVKEYVRKIRPRPKKAYLTLSFAPGECAQVDWGSYGSVNVGGTTRRLSFFVMVLCYSRMMYVEFTVSQTMEHFLFCHQNAFSYFGAIAGRIMVDNLKSAVLKRTLGNDPVLNPKYLDFANHHGFTIAPCGVGKGNEKGRVENGVGYVKKNFLSGLQIGDFKDLNPAVLRWLDTTANVRIHGATGIKPVDMFHQERPQLHRLPTHPYDIASIKEVRASKQFRVVLDTNRYSVPAELAGQLLTMKAYPDRVCLYYQEQLVARHVRSYDRRKDFELPDHPKALMTQRKKAQDQIIFRNFLALHSEADDYYRQLEQRRMNPLHHIRQIVALSDIYGKDQVTRAMEDAFTFRAFSCEYIANLLEQRNRKPPEPGPLHLTRRKDLLELDLDEPNIDIYNRFDPGESQ

SEQ ID NO: 76 - protein, 488 aa, synthetic construct
MIDYETFVKIKVYKDQHGLKCSQIARELNLDYRTVEKWFGQKHYQPRKSPRRASKLDPFKVQIVRMLEAHPYTAAQIFQRLREDDFDGGYTIVKEYVRKVRPPKIKAFLKLSFAPGECAQVDWGSYGAVTVGETHRRLSFFIMVLCYSRMMYVEFTVSQSMEHFLGCHQNAFEWFGAVPGKVMVDNLKSAVLKRVVGKDPVFNPKYLDFANHHGFSIVPCAVGKGNEKGRVESGVGYVKKNFLAGLDIPDFNALKPAVIHWLNTVANVRVHGETGKKPVDRFRRERQSMTQLPSYPYDISTIDQVRASRQFRVAVDGNRYSVPAEYAGALLTLKTYPDRLCIYHREKLIARHIRNYDRRKDIELPDHPKALLTQRRKARDQKIFMRFLSLSDKADAYYRQLEQRRMNPLHHIRQIVALSEIYGDQSVQRAMEDAFAFHAFSCEYIANLLEQRLRKLPEPGALHLTRRQDLLEITVEKPDMEIYNKSLK

SEQ ID NO: 77 - protein, 489 aa, synthetic construct
MIDYAIYCKMMHLRDREQLSAVQIADALSVDVRTVRKWLARKGFAPRTGARRDSKLDPFKRDIGRLLEAHPYSAMQIYQRICQQGFTGGYTIVKDYVRKVRPVRMRAFLTLAFAPGECAQVDWGSFGTVAVGATVRRLSFFVMVLCYSRMMYVQFTVSQTMEHFLDCHQNAFEYFGAVPKRIMVDNLKSAVLKRIVGQAPVFNPRYLDFAAHCGFDISACNVGKGNEKGRVENGVGYVKKNLLAGLAIPDFTALAPAARHWLDAVANVRVHGETREKPTVLFEKERPCLNRLALKRYDVATVYPVRATNQFRVAIDTNRYSVPAEYASRALIAKLSPEWICIYHDDRLIARHGRCYDRHQDIEDPDHPKQLLLWRKKAREQTIVMRFLSLSPRAAGYYRKLEQRRMNPYHHVQKIVALSEIYGTEAVARALEDAFVFAAFSCEYIANLLEQRSRKLPQPGALHLTRRQDLLELEVESADLSLYEDNAHE

SEQ ID NO: 78 - protein, 492 aa, synthetic construct
MIDYPTFLQIKHLQQGQHLKCSQIATELTLDERTVAKWLDENQYRQRKPVQHSSKLDPFKADIVRMIETHPYTAAQLLQRIRENGFDGGYTIVKEYVRKVRPKPKKAYLVLSFAPGECAQVDWGSYGSVRVGDTTRRLSFFVMVLCYSRMMYVEFTVSQTMEHFLSCHQNAFSYFGAVAGRTMVDNLKSAVLKRTLGNNPVLNPKYLDFANHYGFTIAPCGVGKGNEKGRVESGVGYVKKNFLSGLQIGDFKNLKPAALHWLDTVANVRTHGETGRKPVEMLQEERPQLHRLPAHPYDIATICPVRASRQFRVVLDTNRYSVPAELAGQPLTMKAYPDRVCLYHQETLVARHVRSYDRRKDFELPDHPKALMAQRKKAQDQIIFRNFLALHSKADDYYRQLEQRRMNPLHHIRQIVALSDIYGKDQVNRAIEDAFTFRAFSCEYIANLLEQRNRKSTEPGPLHLTRRQDLLELDLDEPNIDIYNRFDPGESK

SEQ ID NO: 79 - protein, 493 aa, synthetic construct
VIDFAQYTRMQHLHKEDKLTHQQIAQKLSLDSKTVAKWLKRERFDARKNAGRSSKLDPHKALIRAWLEKHPYSAQQIFQRLIAENAFSGGYTIVKEYVRKVRPRPEKAFLSLSFAPGESAQVDWGHCGTIAVGNTRRALSVFVMVLSHSRQMYIEFTLSQKQEHFLACHEHAFEYFGGVPESVMVDNLKSAVLEHKRGETPRWNPRYADFARDYGFEIVACNPRAPQEKGRVENGVGYVKKNFLAGRQFQDFHHIAPSARQWLDLIANERVHRVTQQKPRVLWEAERAHLQSLPLNPPETARILRQRATSTFRLCIETNRYSVPAQYASHTLEVHLEAQELRVYHEGSEVARHRRDYGRHGDFENPDHPKALLAGRQKARAHKALQSFLQLGEHAEAFYHGLQKRRLNAPMHLRKIIALEGVYTRAQLSEAISDAHQIEAYSSEYIINLLGQRERPLVQPGPLHLTRPGDQLDIETPQADLSIYDTTPTNQQK

SEQ ID NO: 80 - protein, 489 aa, synthetic construct
MIDYELFCKIRHLKDHEGLSGHQIAGELAMDPRTVAKWLARERFCQRKAVPRSSKLDPFKAEIARLLESHAFSAVQILMRIREQGYAGGYSIVKDYVRSIRPSKRPAYLTLAFAPGECAQVDWGSYGSVAVGSTRRRLSFFVMVLCYSRMLYVEFTVSQSLEHFLACHKNAFDCFGRVPQKIMVDNLKSAVLRRIVGRLPVFNPRYLDFANHYGFTISPCNVGRGNEKGRVENAVGYVKKNFLAGLEIPDFTALSPAVRHWLETVANVRTHGETRKEPVELFEAERPCLLPLPVNAFDIATVSQQRASSQFRITCDTNRYSVPAEYAGRALTVKTDPERICVYAQDKLIARHIRSYERYQDFEDPDHPKALLAQRKKARDQKIFMRFIALSPKADLYYRKLAERRLNPQQHVRKIVALSEIYGKEPVARAIEDAFIFEAFSSEYITNLLGQRARFPKEPAALHLTRREDLLDIRLEHPDLTIYERKTDE

SEQ ID NO: 81 - protein, 508 aa, synthetic construct
MNHLRELIYRLRAGESQRRIARDLSMSRTTVSKYRTWAAAQGYLDETRPLPDKTTLAAAWGEPPHRAHAASSVEPYRKVVQDWVEQGVEMMAIWQHLQDDYQYPGSYSAVRRFVNQLRPVAPEVFVRVHTAPGEEAQVDFGSVGQLYDPLSGRARRAYVFVATLCYSRHQYAELVFDQKTPTWIGLHRRACESWGGVPKRIVPDNLKAAVLKAQVHDPILGEAYRRMAQHYGFVISPTRPRTPRHKGKVESGVHYVQRNFMAGREFLDIRTANQHLGTWVQERAGTRAHGTTHQAPRYLFDEHEKAALLPLPEKPFTLREVRVVKVHPDCHVRIAKSYYSVPYVHVGQQLDAYIGERIVEIYRGIELVATHERSLKAGEWHTRLEHYPQHKAAYLERTPAYCRQVAARLGEATSQVVAALLGDRPLYRLRSVQAILRLEETVGAERLEAACARARYFDDPSYRRVKAILNAALDREPLPEKAPEAPAQQHIFARSGAEFFADGEEVAA

SEQ ID NO: 82 - protein, 507 aa, synthetic construct
VACLDEEVATVPGKRITDHQVTKYKTLRVNYNQEAAAAKTGISVASARRIESMAALPSQRPPRNWRTRSDPLADVWSGEVVPLLEATPGLMAVTVLEELQRRHPERFGESVLRTLQRRMRQWRAEHGEERELFFAQEHPPGRLGLSDSTVADQLGVVIAGASLPHRLYQFAFAHSGWRHVSVVLGGESFQALSSGLQAALWMAGGVPEEHRTDSLWAAFNNLAEQEELTRNYEALCAHYGLRASRNNPGESHENGSIEARQGSLKLALDQALLLRGSRAFDALADYEQFVAEVVRRLNARCARGWEAERGCLRPLPPRRAVDFEEVDARVSKYGVFTAKSSMYSVPSRLVGHVLKVRLFSAHLEAWLGGVKVFECERLYSSTTDKYPRRIDWRHMLPALKRKPGAFARWVLRDAMFPRSEYARTWAHISERLTERQACKLMVGLLDLADRANVVNELAGVLHGLVEQGEVPDLDALVDRFAPRPACMPEVRVVLPAPIVYDALLEAA

SEQ ID NO: 83 - protein, 508 aa, synthetic construct
MNYLRDLIHRLRARQSERAIGRDLGLSRVTVHKYRLLAEKLGLLDSSRPLPEAKELQQLLGPAPKPPQRPSSVEAYRECVEEMLEAGLEMTTIYDRLRDQHGYAGSYSSVRRFVGQLHPKREQVFVRVQAGPGEEAQVDFGSAGSLYDPVSGRKRQGYLFVMTLSFSRHQYAEIVLDQRISTWLCLHRHAFESFGGVPGKVVLDNLKAAVLEAHLHDPVLGEAYRRFAQHYGFIVSPNRPGTPRHKGKVENGIHYAKRSFLAGQDFSDLAEANRKLGLWVREKAGAREHGTTHQAPLALFLSQEQQCLQPLPAWPFDLCETRAVRVHNDCHVTIEGSYYSVPYAYVGQTLEAFLFERIVQLFHGTELVASHPRAQDKGQWLTRPEHYPTEKAAYLEGTAAHCQERAETIGPSTAQLVRELLAERPQDRLRSVHSLLRLSEKVGSARLEAACQRALYFGDGHYRRVKDILNAGLESEPLPDQEVAQVAANVYVFQRQAAEFFSWEVERC

SEQ ID NO: 84 - protein, 491 aa, synthetic construct
VIDYHTFHQIHHLHKVEHLNQAQIAAELQLDEGTVSKWLQSEQYRPCQMPKRPSKLDPFKGAILRMLERHPYSSAQLLPRLKEQGYTGGYSILKAFVHHVRPAPTPAFLTLQFAPGECAQVDWGQAGVVSVGSTRRRLSFFVMVLCHSRMLYVEFTLAETMEHFLAAHQHAFEFFRGVPQQVMVDNCKVAVLQHRRGEPAIINPRYLDFANHYGFAIKPCAVRQPQQKGRVEKAVDYIKGNFLNGLELTTFDPMNPAVRVWLDTVANVRVHGETRQKPVDLFVQEQKQLHPLSALPYEAAGVRPVRTNGRFRVIVDTNRYSVPARYASSAVLTLKAFPDRLCFYHAQQLVAEHVRSYDRHQDFEHPDHAAPLLAQRQTARRQQLLARFLALSPQAAEYYRQLEARRTVPRHHVQKIVALSDIYGPEKVGRALEDAFHYAAFSAEYIANILEQRERKLPEPGALHLTRQLDLLDLELPEPDLSVYDQKGGGR

SEQ ID NO: 85 - protein, 492 aa, synthetic construct
MLERRLIFEIHRLKDLGLSIRAIAKALKIGRDTIGRYLDNPNPQRPTIKRPSKLDSFKDEIAKMLSVDPEASGEVIRRRLALLGFDGGKTIVNDYLKTVRGEYRQKRAFIRFESLPGAQMQIDWGHFDCLTYGNTKRKLYCMAAIECHSRLLYLEFTHSQRQETLHCCLLNAFRFFGGTPRELVHDNMLTAVVERDGPLVRYNEAFLTFLRHFHIVPFACNPAQPQEKGKIEKGAINYIRNSFWPLRTFKDLFEVQSQAEHWRDTVANVRLHRTTGERPIERFKPDHLKPLPDTLPDCRDTAEAKVYPDFCFHFDGNTYTVAPWLIGKHVTVKADSRTVSVYFKEKLVAVHHRSWQRRERIELPEHRDAARSQRHKHWVSQDTAILISLGEESKTYVERLATTQQPLKKSVQRLLALMDEYGSAALLQAIRRATSHNAYGADYIENILYQEMTPKRQHPPVRLNQEALNRIRLQEPCLAEYDSLAVRRRKPK

SEQ ID NO: 86 - protein, 523 aa, synthetic construct
MAGKITSMSKIKQVLIMHKQGMSNRDIASEIGINKCTVNDYMRKIRLEPLGIDELLALDDPVLEGRLFAGSPAYTDPRMEEFLKELPYFIDQLKIPHVTRFLLWEEYIRKHPDGYGKSQFFFHLKQNLVVEKTPVGVLTNRYEPGKELFVDFAGDTQSYIEPSTGEVIEVQVFVATLPYTDYAFAFCIESQKVEDFLHCIRMCLEYIGGVPRILVSDNLKSAVIKSDTYEPTLNKALEDMGNHYHFAVLPARSLHPKDKALVESQVSRIYHKVYARLRNRQFYSLQELNEAISQALLAYNQTRMQLRPYSREEHFHSSEKSALQPLPDTIYEMKCYANVTVRETGEVYLSCDKHFYSVPYELTGRKASIIYTRSLVKVYVDNKSVAIIPRDRTPGEHTQIPAHLPPNVRAYLERSPESYCDKARHVSESLEKLFQSMFFNRATGVNFDVYYRSCEKMLSLQKKTASSLFDKACDVCRINHIYRGTGLEDVINAMGKTIADEESERSTVIPSNHENTRGPAEYK

SEQ ID NO: 87 - protein, 518 aa, synthetic construct
MLTNEQIDAIHRLHFVEKWPARKIARHLHIGRRTVTKYLIKPAQPPMHRLRASKLDPFKPVIEEWLQQDSSVTAAVIFQRLRDHGFAGGYTIIKDYLQDVRTETKPRRAFVRMEPAAGERFEIDWGHFGALVYNGAPRKLYAFCLVECHSRKMYLEFTHSQTFETFVRCHIHAFDAMGGVARELWFDNLTTVVAEHDGNLVRFNPRFLGFAREYGFVPRACHVAAAWEKGKVERAIGYVRQNFWPLRGFIDLPDVNSQAHQWLKQIANQRRHRETGQTPEERFRPECLRPLPAIPPDYRDSADALAHKDLRLSFDGNRYCVPPRFVGRWLTVKADSSSVTIYDQHQEIVRYPRSWWRGQTFGAERFEKELFAQMAAAERSAAQHRVVVLLGPASEEYLRRLADTDRSLTRQVRELLTLIRDYGPDAVAAALEKARAAGAFGADYIANILRQQQSRRDVQPPLELKDPALNQLATDPLSLAEYDAFILRSRKESCELATSETESTQPHDDESESGPDSD

SEQ ID NO: 88 - protein, 484 aa, synthetic construct
MDRKTVGRYRAWAIEQGLLDGELPTLGELNRLMEETLKSTPPPQNVSSVEPYREVIETLHKAGVEATAIHQRLQERGYSGSYSSVLRFVRRLEPPAPKVTVRVETRPGEQAQVDFGYAGRMIEPETGELRRAWAFVMVLSWSRHEYVEFVFDQTVETWLRLHRNAFDFLGGVPRQVVIDNLKAGIVQACVHEPQAQHAYRECAEHYGFLISPCRPRTPEHKGKVEQGGVHYVKRNFLAGREPMTLPQANREVLRWVETTAGRRIHGTTKEQPLVRFETERQALLPLPSTPYDLAVWKQVKLHADCHVTFEQAYYSAPFRLVGQMLWVRGGTREVQIYTSDYQLKATHPRAQKPGQRLTNLDHLPPHKLPGLILSREGCRQRAAEIGPATGEVVGVLLDHRPEDRLRVAGRLLRLAERFSPDRLEAACARAIRFDDPAYVTIKHILEQGLDREKLPAITLAPPAQTFVRTADELVSHLKGGVSWN

SEQ ID NO: 89 - protein, 516 aa, synthetic construct
MPGKRKEAMDVREIIRHLREGRSDRAIALATGVNRKTVARYRVWAVEHELLRGALPPLGELHRMLDEMSQGTAPPQNVSSVEPYRELVRKLREARVEVTAIWQRLQERGYTGTYSSVRRFVRRTEPSTPEVTVRVETRPGEEAQIDFGYAGHMVDPETGEVRRAWLFVMVLSWSRHMYVEFVFDQKVETWLRLHCNALAYFGGVPERVVIDNLKAGIPRICFDEPQAQHAYRECAEHYGFLISPCRPRTPQHKGKVEQGGVHYVKRNFLAGRERMTLTQANQEVLRWVETTAGRRIHGTTRERPLVRFETERQALRPLPPAPYELAVWKKVKLHRDCYLHFENAYYSAPFRFVGLHLWVRGGTRRVQVYTTDYQLVASHPRAERPGQRATHFNHLPPEKLPGLILSRDGCRQRAAQIGQATRQVIDSFLDHRPEDRLRMAGRLLRLAERFGDDRLEAACARAIGFDDPAYLTVKRILEEGLDVEQAPLAPPAAPARTFVRSPGELVQHLQGGVSWN

SEQ ID NO: 90 - protein, 498 aa, synthetic construct
VPGKKITDHQVRKFKEVRNRATQEIAAAKSGMSVRSARRIEEAKGLPSQVGARTWRTRSDPLAGVWDEEVVPLLESEPGLLGTTLFEELRRRHPERFEPGLVRTLQRRVRAWRAQHGGERETYFAQVHPPGRFGLSDFTVADELKVFVAGEAYPHRLYQFALAYSGWRYAEVVLGGESYMALASGIQNALWAIGGVPEEHRTDSLSAAFNNLAEEEQLTTRYAALCLHYGMRPTRNNLGVSNENGAIESRQGTLKVALDQALLLRGHRGFDCESDYREFVAEIVARMNHRVRSQTAAERPLLKALPVRRTSEFEEIEARVTKFGTLTVKRILYSTHSRLIGHRLKVRVYTERIEGWLGGVCVMEAPRGHLEAGQRRGKAIDYRHLLPALRKKPGAFARWALRDEMFPRSEYRRTWERLHEMLPERQACKTMVGLLDLAARGACEADLAGVLADLLQAGTLPELPGLEERFAPRVADLPEVKIKLPTLADYDALLQGAA

SEQ ID NO: 91 - protein, 362 aa, synthetic construct
MPGTIIDMSKIKQVLQLSMNGISNRQIAKALSIDKETVNNYISKAKRETLSFKELIKLDDPVLERRFHFGNPAYSDERLQTFMELLPFFVEELSNKHVTRYNVWQNYREAYPNGYGRSQFFFHLGQNLEAKKKPSTVLYGSYNPGEKIFVDFAGDTLSYVNRDSGEIIKIQVFVASMPYTDYALRMCFEYLGGVPKIVVTDNLKSAVIKADKYEPTLNKALEDMGNHYGFVVIPCQPASPTQKALVENQVKLIYHRIYSKLRNRQFFSLQEINEAVWELLKAHNQTRMQQRTYSREEHFFSVEKGVLKPLPATPYQMRYYSDVTVQQNSHVYLSRDKHYYSVPYILIGRRAKIIYTSEDISC

SEQ ID NO: 92 - protein, 528 aa, synthetic construct
MAGTIKDMSLIKQVIQLKQLGESNRGVSRKLSINKGTVNAYVNIIQCNGFNYDELLSKDDPELDRLFHAGSPAYSDPRMADFLAKLPYFKEQLGNPKLHVTRQLLYEEYKAGYPHGYGKSQFYFHLQQNLIAQKDCTAVLTETYNPGEKLMVDFAGDKLSYVDTETGEIIKVEVFVACMPYSDYTYVICVPSQKTEDFLFAIRMCLEYLGGVPPILTPDNLKSAVITNDRHEPKLNKALEDMGNHYHFVVLPCDPKEPTQKALVEDKVQTTYNRIYAKLRGRTFYSIVELNRAVWDLLSLFNKTRMQKRPYSREERFHAAEKDKLKQLPQKIYEMKYYANLQVQTNCFVELRQDKVTHFYSVPYIYVGKKALVIFTRSVVNIYIDGTQVATHMRSYEYGHTYIKEHLASNCRAIMERSASYYITWASHISPECRNYISEVFNPQRTSQPEEVYYKLCASIMSLSRKYEVAIIDKTCRQCRECKVFSYRKFEAILKHNSLIASEDEPTRCFEAPIPKDHANMRGSNYFK

SEQ ID NO: 93 - protein, 518 aa, synthetic construct
MLTNEQIDTIHRLHFVEKWPVRKIARHLHIGRRTVAKYLIKPAQAPLHRRRASKLDSFKPVIEEWLQQDSSVTAAVIFQRVREQGFAGGYTIVKDHLQDMRTETKPRRAFVRMEPAAGERFEIDWGHFGALVYNGAPRKLYAFCLVECHSRKMYLEFTHSQTFETFVRCHIHAFEAMGGVARELWFDNLATVVAEHDGNLVRFNPRFLGFAREYGFVPRACHVAAAWEKGKVERAIGYVRQNFWPLRGFIDLPDVNLQAHQWLLQIANQRRHRETGQTPEERFRPECLRPLPAIAPDYRDSVDALVHKDLRLSFDGNRYCVPPRYVGRQLTVKADSSSVTIYDQHQEIVRYPRSWWRGQTFGAERFQKELFAQMAAAQRSAAQHRVVALLGPASEEYLRRLANTDRSLTRQVRELLTLIRDYGPDAVAAALEKARSAGAFGADYIANILRQQQSRRDVQPPLELKDPALNQLATDPLSLAEYDAFILRSRKESCEPTTSETESTQPHDNEPESGPDSG

SEQ ID NO: 94 - protein, 491 aa, synthetic construct
VIDYETFCKIHDCHDRQGLTIAQTARALGLHPQTVATWVARARFEPRRSRPRSSVLDPFKPRITRLLDTHPYSAQQIFQRLREDGYQGGVTILRNYIRRIRPTKKPVYLKLHFSPGECAQVDWGCYGTVAVGNTRRKLSFFVMVLAFSRQMYVEFTVSQTMEHFLACHEHGFAAFGGVPSKIMVDNLKSAVLQRLAGAAPVFNPRYLDFARHHGFAIEACNVARGNEKGRVERGVGYVKKNFLQGLELTEFGTIHAAAQLWLDTVANVRIHGETQQRPVDLLAHERPRLGRLNPHPYDIAHTSTSVASSQFRITLDTNQYSVPAAYAHRRLTVKAYPDRVCIYFDNELIARHTRHYGRHEDIEEPDHAKALIAQRGRAREQRLMMHFLALSPDAPAYYDGLEQRRLNARQHVRKILALAEIYPADELRRAITDGLAFQAFSAEYITNILEARARALPEPGPLQLTRRHDLLDIDIAPPDLNAYEVDDHDPD

SEQ ID NO: 95 - protein, 439 aa, synthetic construct
RDPLATVWDAEVVPLLQADAQLNAVTLLEELQRRYPGEYGGGVLRTLQRRMRQWRAMHGAEREVFFAQEHPPGRLGLSDFTVANDLGVEIGGTSFDHRLYQFALAYSGWRHAVVLTEGESFMALSTGLQAALWRLGGVPEEHRTDSLSAAFNNLAEQQELTRRYEDLCRHYGMRASRCNPGQSQENGSIESRHDSLKTAIDQALRLRGSRRFDDRAGYAAFVEQIVQRFNARVATRLAVERPMLEALPERRTAEYDEMPARVSKYAIFTVKGAQYSAPSQLIGHRLMVRQYAQHIEGWLGGQRVLERPRATHRDGQRHPRSIDYRHLVEALKRKPGAFARWVLRDAVFPREVYRRTWERLAAALPEREACKTIVGLLALAADGHETQLAGELEQLIELDQLPDLHALTRLLAPPRSELPDVAVELPELAGYDELIEVAQ

SEQ ID NO: 96 - protein, 486 aa, synthetic construct
VINYETFCKIHDCHDRQGLTIAQTARFLGLDPRTVATWVSRPRFTPRRSRPRKSLLDPFKSTVTRLLDTHPYSAQQIFQRLREEGYTGGITILRDYVRRTRPAKLPVYLKLAFAAGEAAQVDWGSYKTVTIDGTERRLSFFIMVLAYSRQMYLEFSVSQTMEHFLTFHQQAFKAFGGVPAKLMVDNLKSAVLERLVGTAPVFNPRYVDFANHHGFEIAPCNVRRANEKGRVESGVGYVKKNFLNGLGLTDFAAVQAQGQLWLDTIANVRTHNETRRRPSDLLVEERPHLKPLNPNFYDCARVLTCVASSQFRIRLDSNRYTVPSSYAHRKLTVKVWPDRICIYFDDKLIARHDRRWGRNKDYEDEEHSKELVARRHRADEQRLLTRFLALSPDAAAYYKGLEQRRANARHHLRKILALAEIYSADQVARAITDGLAFEAFSAEYVTNILEVRARALPEPGPLQLTRRQDLLELEVAPPNLNDYGER

SEQ ID NO: 97 - protein, 503 aa, synthetic construct
MIDYATFCRIHALHQQDGLNIRQIARELELHAETVAHWLKRETYGPRKQRKRGSKLDGYKGQVVRWLQTHAYTAAQILQRLREQGYAGGYTILKEFVSEVRPPQHSAYLTLHFAPGECAQVDWGYAGVANVGGTRRRVSFFVMVLCYSRMLYVEFTLGETQEQFLDCHQHAFEFFGGCPKRVMVDNLKSAVLSHPAGQPAVYHPRYLDFARHYGFEVRACNVGAANEKGRVENGVRYVKSSFLHGQVLEQFAPLNPAALEWLDAVANVRQHGQTHQRPVDLFEGERPALQPLPVARYDVGVNRLVTASPQFRVTLDTNRYSLPSEYASRRLTLRVYPDRLLIYHEQKLIAEHARRYDRHQDVLNPDHERPLLQQRRQAREQQLLRRLLRLSPRAAEYYQQLEFKRLNPTVHIRKIVALSEIYGEQRVGRAIEDALEYQAFSSEYIAILLEQRSRQMPEPGALHLTRREDLLDLELPEPDLSIYDGDATHPSTEETDHDETGHA

SEQ ID NO: 98 - protein, 502 aa, synthetic construct
MPGKKITDHQVLKYKEHRKTRTQVAAAAKAAISERSARRIDKSQTLPSQRGRRSWRTRQDPLADIWDAEVVPLLQADAQLNAVTLLEEMQRRYPGEYGADVLRTLQRRVRQWRAVHGAEREVYFAQEHPPGRLGLSDFTVADDLGVQVDGAAFDHRLYQFALAHSGWRHAGVVSGGESFLALSTGLQAALWRLGGVPDEHRTDSLSAAFNNLAEQQELTRRYDDLCRHYGMRASRCNPGQSHENGAIESRHDSLKTALDQALRLRGSRHFDDRAGYEAFIEQVVQRLNARAAKRLSVERALLKPLPARRTAEYEELPARVSKYAIFTVKGAQYSAPSQLIGHRLTVRLYAQRVECWLGGQRVLERDRATHRDGQRHARDIDYRHLVAALKRKPGAFARWVLRDAAFPRAVYRQTWERLAAAKPEREACKTIVGLLALAADGHEAQLADELEQLIELDQLPDLDALSALLAPSAREVPDVAVELPGLDDYDELIESVDEEAVR

SEQ ID NO: 99 - protein, 528 aa, synthetic construct
MAGTIKDMSLIKQVIQLKQLGESNRGVSRKLSINKGTVNDYVNTIQRNGWDYGGLLSKDDPELERMFHAGSPAYSDRRMPDFLALLPYYKKQLSNPKLHVTRQLLYEEYRAGHPSGYGKSQFYFHLQQNLVAQKGCTAVLTETYNPGEKLMVDFAGDKLGYVDTATGEVIKAEVFVACMPYSDYTYVICVPSQKTEDFLFAVRMSLEHLGGVPPILTPDNLKSAVISNDRHEPKLNKALEDMGNHYHFVVLPCDPKKPTQKALVEDKVRTTYNRIYAKLRGRTFHSIMELNKAVWEQLSLFNKTRMQKRPYSREERFHAAEKGRLKPLPQNVHEMKFYATLQVQGNCFVELRQDKVTHFYSVPYIYVGKKALVIFTRSVVNVYVDGIQAASHMRSHEYGHTYLKGHLASNCRAIMERSASYYITWASRISPECGDYISEVFNPQRTNQPEEVYYKLCASIMSLSRRYETKIINKTCKQCIDFKIFSYRKFESVLKHNTLIASEDEPATCFEAPVPTDHVNMRGSSYFQ

SEQ ID NO: 100 - protein, 523 aa, synthetic construct
MAGKITSMSKIKQVLIMHKQGMSNRDIASEIGINKCTVNDYMRKIRLEPLGIDELLALDDPVLEGRLFAGSPAYTDPRMEEFLKELPYFIDQLKIPHVTRFLLWEEYIRKHPDGYGKSQFFFHLKQNLVVEKTPVGVLTNRYEPGKELFVDFAGDTQSYIEPSTGEVIEVQVFVATLPYTDYAFAFCIESQKVEDFLHCIRMCLEYIGGVPRILVSDNLKSAVIKSDTYEPTLNKALEDMGNHYHFAVLPARSLHPKDKALVESQVSRIYHKVYARLRNRQFYSLQELNEAISQALLAYNQTRMQLRPYSREEHFHSSEKSALQPLPDTIYEMKCYANVTVRETGEVYLSCDKHFYSVPYELTGRKASILYTRSLVKVYVDNKSVAIIPRDRTPGEHTQIPAHLPPNVRAYLERSPESYCDKARHVSESLEKLFQSMFFNRATGVNFDVYYRSCEKMLSLQKKTASSLFDKACDVCRINHIYRGTGLEDVINAMGKTIADEESERSTVIPSNHENTRGPAEYK

SEQ ID NO: 101 - protein, 492 aa, synthetic construct
MIDFETFLKIKHLHRHDGLKSSQIADAIGHDDRTVCKWLNENQYRPRKPSVKSSKLDAFKDDILRMLEAHPYSAVQVLQRIRDDGFDGGYSIVKEYVRKVRPRRKRAYLTLSFAPGECAQVDWGSYGSVKVGDTTRRLSFFVMVLCYSRMMYVEFTVSQTMEHFLSCHQNAFSRWGAVPERIMVDNLKSAVLKRTVGKDPVLNPKYLDFANHYGFAVAPCGVGKGNEKGRVESGVGYVKKNFLSGLQIKDFTDLNPAVSRWLDTVANVRIHGETGKRPVDMFQQERSHLHRVPVHAYDIATISQVRASRQFRVVLDTNRYSVPAELAGQPLMMKTYPDRICIYHQEKLVARHVRSYDRRKDFELPDHPKILLAQRKKARDQIIFRNFLALHPKSDDYYRQLEQRRMNPLHHIRQIVALSDIYGKDQVTRAIEDAFVFGAFSCEYIANLLQQRNRKFKKPGPLHLTRSQDLLELDLDEPDIDIYGRFFIGDSE

SEQ ID NO: 102 - protein, 489 aa, synthetic construct
MIDYERFSKINHLKEQEGLTAPQIAAELAMDVRTVRKWLTETFRPKKITPRPSKLDPFKRDIMRMLQTHPYTATQIFQRISEEGFDGGYSIVKRYVRKVRPTKSPAFLKLSFAPGECAQVDWGSYSSVNVGSTRRRLSFFVMVLCYSRMMYVEFTVSQTMEHFLGCHQNAFDFFGFVPKKIMVDNLKSAVLSRIVGQSPVFNPKYLDFANHYGFTIAPCNVGKGNEKGRVENAVGYVKKNFLSGLHIPDFSAIAPAARDWLDTIANVRIHGQTRQKPLDLFEKERPFLNPLPVNPFDVATVSQVRASSQFRVTLDTNHYSVPAEYAGARLTLKAYPQRICVYFKDKLIARHVRSYDRYRDFEDPDHPKELLNQRKKARDQKIFMRFLALSPKADLYYRKLEQRRMNPHHHVRKIVALTEIYDPDAVARAMEDALDFDAFSSEYIINLLEQRSRFLPQPGALHLTRREDLLQINVGQPDLTIYERSNHED

SEQ ID NO: 103 - protein, 462 aa, synthetic construct
MKYPQHTTSTQVEAALREIGGWPLHLRQVHARLRAHFARPEAHQHALLYLQAVLSDLPRKNGWQIAEHARQARPYGMQRLLSQAVWDQDAVRDAVRRLVAEALLPSDAPPQDQAPFPVLVVDESGFPKRGRHSAGVGPQYCGLTGRVENCQVGVFLSYVTARGHALIDRELYLPEDWCADPARRFAAHIPETAAFRTKPELGQQMLGRAQAADLPFRWVVADTVYGHSPDLRAFLEEHGISYALAVPSTEVVCVQTRAGILLSDVGSLTQQALRAREWQRLSQSLGTKGERLFDWARLPLVQAGTTDGCHWLLVRRCLDDPNELAYFLLWAPPDTPLPSMVQAIGARWRIEEDLQASKDLGLDHYEVRSYLGWYRHLTLVLLASAFLVGVTVQHHSTGAVQQEPAPCAPLLPLTTSEARHLLAHLIFPPPTAAPLICHWSLFRRTHQYWAGYYHRRRRDKAG

SEQ ID NO: 104 - protein, 505 aa, synthetic construct
MSGKAVKSEQVRVYMQTREAGKRQVTASSKAGISERSGRRIEKGELQPGGKQQRHWRTRVDPFAEVWDCEVVPLLTKNPKLNPITLFEKLHQDHPGKYQNSHLRTFQRRVSEWKALYGPDKEVMFRQEQVAGRMGLSDFTKLKDVQITISGQVFVHLLYHFRLAFSGWCSVKVVHGGESYTALSEGLQDALWRLGGAPREHRSDSLSAAYRNLDTDAAEDVTKRYKQFCHEYGMEASRNNRGKGHENGSIESPHGHLKNRIKQALLLRGSSDFPSEASYVQFLSEIVSGINSRNQDKIDQERQHLHPLPLAKSADYTETVAAVSTSSTIQVKRILYTVPSRLIGERLRVHIYDSRLDCYLGSALTITLPRFFVSNHNRRGRQVDYRHVISSLEKKPQAFRYSQLRDDLLPDETYKAVWIWLDRELTARQSCKTMVGILALAHREDCQQQLGEYLQKMMTDSTVPSLLDLQRRFASRAQAVPHIQISQPPASDYDILLNNCVQGVH

SEQ ID NO: 105 - protein, 525 aa, synthetic construct
MAGKTKDMSDVRKVLQLHEQKVSNRKVAKQLGLDKNTVNRYIATLSNLNMKVSDLLRMEDPELEKMFFSGSPAYTDERMDTFLEELPYYRDQLKDKHVTRLLLYEEYKARHPEGYGKSQFFYHLSQNLVAQKGPTAVLTYTYDPGTYLFVDFAGDKLSYIDPGTGEIVEVEVFVACLPYSCYEYAVCVPSQKMEDFFHAIRMCLEHIGGVPKIVVSDNLKAAVIKADKYDPQINKAFSDMGCFYGFVPMPCEPHSPTQKALVESAVRRVYHHVHAKLRNRTFTSILELNKAVEKLMRKHNQTRMQTRQYSREERFFSKEKGLLKPLPDGDYETKYYQRHKVGYNNFVIVGPDKRNYSAPCQYIGKMADIIYTRSIVKIYVDGKLVATHSRSYNKRYVYEEEHLASYNREIMLREPVRFHERAVRISKACGEYVDSMFEHARQNSQPVELYYNTCQGVINLRRSIHWDIYDETCRQCRENGIYSVRRFERVAKTVAVTLPTDAATEELEAPVPTNHENMRGASQYQ

SEQ ID NO: 106 - protein, 514 aa, synthetic construct
MMDIRELLVHIRAGSSNRQIEKDLHIDRRTVGRYRAWADGQGLLEGTLPSLGELVALLERTMPTHNPPQNISTVEPYREVVTQLIEEGVEIAAIWERLKERSFTGSYSAVRRFVRKIKPLTPKATVRVERKPGEEAQVDFGYAGLMINPDSGALRRTWVFVMTLSWSRHQYAEFVFNQKVETWLRLHRNALAWFDGVPERIVIDNLKAAITKAVRDDPQVQQSYRECASHYGFLIAPCRPRTPEHKGKVEQGGVHYVKRNFLGGRQPTTIIQANQDVLVWCNTTAGLRVHGTTKEKPLLRFQDVEQARLQPLPETPYDMAVWKKIKVHRDCYVEFDKAHYSVPYRLVGQHVWACGGTQMVRIYTTKHELVSTHDRAQRPGERLTHLDHLPPEKVPGLTLNREDCLATATEIGTSTLQVVETLLGDPVIDRLPTVGRLLRLRKKFSDERLELACERALYFDDPAYRTVKRILTEGLESNPLPTHVTAPIATTFVRSTDELIGDLATSFDGGAPWN

SEQ ID NO: 107 - protein, 508 aa, synthetic construct
MDIREMVRRMQIGQSDRAIAKALQVDRKTVGKYRYWATEQELLEGELPSLGDLQALLDETLSPPPPPQNTSTVEPYRELVVEWRKAQVEIAAIHQRLLERGYSGSYSSVHRFVRALEPREPEATVRVETPPGEEAQVDFGYAGMMIDPETGQPRKTWVFVMTLSWSRHQYAEFVFDQKVETWLRVHRNAFEFFGGVPERVVPDNLKAAIVRGCWDEPEAQQAYRECAEHYGFLISPCRPRTPQHKGKVEQGGVHYVKRNFCGGREPTPLPQLNRKVLEWCITTAGERIHGTTKERPLERFATEQPLLRPLPGTPYDMAVWKTAQVARDCYVTFERAYYSVPFRLVGQQVWVRGGTHAVHIYTSDYHLVATHDRAHQPGQRLTHLDHLPPHKVPGLMLTREACRLQAAEIGPSTQQVVAVLLAHRPEDRLRTAGRVLRLAERFSPERLEAACTRALHFDDPAYGTVKRILEGGLDAEEPPAVAAPPPAQTFVRSAVELVGHLMGGVSWK

SEQ ID NO: 108 - protein, 508 aa, synthetic construct
MDIREMVRRMQIGQSDRAIAKALQVDRKTVGKYRYWATEQELLEGELPSLGDLQALLDETLSPPPPPQNTSTVEPYRELVVEWRKAQVEIAAIHQRLLERGYSGSYSSVHRFVRALEPREPEATVRVETPPGEEAQVDFGYAGMMIDPETGQPRKTWVFVMTLSWSRHQYAEFVFDQKVETWLRVHRNAFEFFGGVPERVVPDNLKAAIVRGCWDEPEAQQAYRECAEHYGFLISPCRPRTPQHKGKVEQGGVHYVKRNFCGGREPTPVPQLNRKVLEWCITTAGERIHGTTKERPLERFATERPLLRPLPGTPYDMAVWKTAQVARDCYVTFERAYYSVPFRLVGQQVWVRGGTHAVHIYTSDYHLVATHDRAHQPGQRLTHLDHLPPHKVPGLMLTREACRLQAAEIGPSTQQVVAVLLAHRPEDRLRTAGRVLRLAERFSPERLEAACTRALHFDDPAYGTVKRILEGGLDAEEPPAVAAPPPAQTFVRSAVELVGHLMGGVSWK

SEQ ID NO: 109 - protein, 513 aa, synthetic construct
VHDLRELLRHLQSTVNDREVQRATGLNRRTIARYRAWASQQALLDPAQALPPLEELQQLTASTLAIRPPPQTVSSLEPHRDLVLQLHAQGVEGAAIRLRLQEHVGFTGSLSAIYRFLQRVDPPPLDVCMRVERAPGYEAQVDFGFAGRMRDPATGLLRKTWAFVMTLASSRHQYVAFVFDQSLPTWIALHAHAFRFFGGVPQRVVLDNLKAGVTQACFDDPQVQASYRACAEHYGFLIAPCQPRTPEHKGKVEQGGVHFLKRNFLGGRTPTDLAQANADVRVWCVTTAGLRTHGTIKAQPLVRFQSREQATLRPLPPAPYDLAIWKRAKLHRDSYVVFAQSFYSAPFRLVGQTLWLRGGSQSLRIYTSDYALVATHARAAQPGERLTHPDHLPPEKLPGATWTRAICQTQAAEVGASTTAVVQRLLDDGVIDRHQRVIRILKLRARVGDVRLEAACARALRFDDLTYATLKRMLERGLEREVVAPPAPPPTAHTFLRSASELLGHLFGGATWN

SEQ ID NO: 110 - protein, 462 aa, synthetic construct
MKYDHHTTSDEAVPSLQEIGRWPLALIHLHERLTAYFARPEPRQHALLYLQAIVSEIPRKNSWQIAEHAKQARPYGMQRLLSRAVWDEEGVRNEARAFALHSLSPEGPGVAHQAPYPMLVIDESGFPKRGTKSAGVQRQYCGATGQVDNCQVGVFLSYVTAQGHALIDRELYLPEDWITDAHRRQAAHIPETIVFQTKPELAGHMVQRAQSASLPIHWVVGDTVYGHSTDLRLWLEEQGFSYALAVPSQEVVCVQTPQGYRIAEVASIEQQVLDAQDWQRLSMSQGTKGERLFDWAIVPQVHRGTVDGRHWLVIRRCLDAPSEKAYYLVFAPPGATLHLIVLAIGARWSIEVDLENAKDLGLDQYEVRSYVGWYRHITLVLFAAVFLLSICLQDSRSHPQQEEPPPALPLIPLTTSEVRHLLARLIWPAPTHAPLICQWSWWRRAHQYWAGYYHRRRRLKAG

SEQ ID NO: 111 - protein, 464 aa, synthetic construct
MKHHQDTTSAPAEPSLGAIGTWALSLRQVHQRLAPHFARPEVRQHALLYLQAILSDIPRKNGWQIAEHARQARPYGMQRLLSRAVWDEAGVRDELRTLVCQTLSPPGSAVDEPPFPILVLDESGFPKRGRHSAGVGPQYCGATGQVENCQVGVFLSYVTARGHALIDRELYLPEDWCCDLPRRQAAHIPETVSFQTKPELAQLMVQRAQAAHLPIRWVVADTVYGHCPDLRVFLQEQGYAYALAVPSTEVVCVQTRAGILLSDVASIAHQGLRARDWQRLSASQGTKGERLFDWARLPVMHAGTVDGRNFLVIRRCLDDPDELAYYLVYAPLDTPLSIIVQSIGARWHIEEDLQATKALGLDQYEVRSYRGWYRHITLVLLAYAFLVSICLQAPRPLPVPAEDPRAKPSPPLIALTPCEVRHLLAHLFWPAPTAALLICQWSRFRRTHQYWAGYYHRRRRAKVG

SEQ ID NO: 112 - protein, 373 aa, synthetic construct
MSLLHLHQRLAPPFARPEVRQHALLYLRAILSEIPRKNGWQIAEHAREERPYGMQRLLSRAVWDQEGCRDELRALVRQALSPPPLVPASAEHEPLYPVLVLDESGFPKRGRHSAGVAPQYCGVSGRVENCQVGVFLSYVTERGHALIDRELSLPDDWCADLPRRRAAHIPDTLSFATKPELAKRMVQRAQAAGLPIRWVVADTVYGHSSDLRNWLEEQGYAHALAVPSTEVVCVQTRAGLLLADVASIAQRALRAQDWQRLSASQGTKGERRFDWARLPLVHRGEVDGRHWLVFRRCLDDPHELAYYLVWAPADTPLSPMVRAIGARWHIEEDLEVSKDLGLDQYEVRSYLGWYRHYLECSFVTVRIMYVIRE

SEQ ID NO: 113 - protein, 479 aa, synthetic construct
LFELSIRNENGMKHHQHTTAEQAGPPLGEIGTWPLSLLQLHQRLGPRFARPEARHHALLYLQAILSDIPRKNGWQIAEHARQPRPYGMQRLLSHAVWDEDGVRDDLRTFVCQTLHPPPLLPPSAANAQVFPVLVIDESGFPKRGRHSAGVQPQYCGISGQVENCQVGVFLSYVTALGHALIDRDLYVPEDWCHDLPRRRAAHIPDTLTFATKPELAKRMVQRVQAAGLPIRWVVADTVYGHSPHLRDFLEEQGYAYAFAVPSTEVVCVQTRADILLADVASIAHQALRAQDWQRLSGSLGTKGERLFDWARLPVVHGGAVDGRHWLVLRRCLDDPNELAYYLVWAPQDTPLPIMVQAIGARWHVEEDLQATKALGLDQYEVRSYRGWYRHVTLVLLAYAFLISICLQAHRPLPAPATDSGARPSPPLLALTPSEVRHLLAHLIWPAPTSAPLICQWSWWRRIHQYWAGYYHRRRREKAG

SEQ ID NO: 114 - protein, 414 aa, synthetic construct
ARQARPYGIQRLLSTAAWDQDAVRDDLRALVCQSLTPSGRQAEGEAPFPVLVVDESGFPKRGRHSAGVGPQYCGLTGRVENCQVGVFLSYVTARGHALIDRELYVPEDWCSDQPRRQAAHIPDHITFQTKPELAKVMLQRAQAACLPMRWVVADTVYGHSPDLRRWLEEQDAAYALAVPSIEVVCVQTPAGYLLSDVADIAHQALRPKDWQRLSQSQGTKGPRLFDWARLPVVEHGVTDGRHWLVFRRCLDEPHELAYYLVFAPPTTPLSIMVQAIGARWHIEEDLQACKDLGLDHYEVRSYVGWYRHLTLVLLACAFLVSITVQHHLTGAAQPAEPAACSPLIPLTTSEARHLLAHLIFPAPTSAPLICHWSRFRRTHQYWAGYYHRRRRQKAGSRLRVEPVFPSQDFSWEFS

SEQ ID NO: 115 - protein, 468 aa, synthetic construct
MKHHQHTTPEQAGPSLSEIGSWLVSLHQLHERLRPRFARPEVRQHALLYLQAILSDIPRKNGWHIAEHAQQSRPYGMQRLLSRAVWDEDGVRDDLRLFVCQTLHPPPLLPAEAVPAQVFPVLVIDESGFPKRGSHSAGVAPQYCGASGQVDNCQVGVFLSYVTALGHALIDRELYLPEDWCSDLPRRQATHIPETITFQTKPELAKRMVQRAQAAGLPIGWVVADTVYGHSPDLRLWLEEQGYASALAVPCSEVVCVQTRAGILLNDVASIVQQALRARDWQRLSASLGTKGERLFDWARLPIVHAGLMDGRHWLLVRRCLDDPHELAYFLVFAPLETPLPTMVQAIGSRWHIEEDLQATKALGLDQYEVRSFQGWYRHITLVLLAYAFLVSICLQAPRRLPVPAEDKRAKPSSPLIALTPSEVRHLLAHLIFPAPTSAPLICQWSRFRRTHQYWAGYYHRRRREKAC

SEQ ID NO: 116 - protein, 465 aa, synthetic construct
MKSPQHTTPAPIGPTLREISRWHEHLRELHVRLRPHFARPEVHQHALCYLQAVLSDVPRKNGWQIAEQARQASPYGMQRLLSAAVWDQDAVRDDLRALVTASLSAPQPSQKEPAGEAPFPVLVVDESGFPKRGRYSAGVGPQYCGLTGRVENCQVGVFLSYVTAAGHGLIDRELYLPEDWCSDLPRRHAAHIPDTLTFQTKPELAKLMIHRTHVAGLPFRWVVADTVYGHSPDLRSFLEEHGFSYALAVPSTEVVCVQTRSGLLLSDVASIAQQAFRMREWQRLSQSQGTKGERLFDWARLPLVQAGTTDGRHWLVVRRRLDDPNELAYYLVWAPADTLLPTMVQAIGARWHIEEDLQAGKALGLDHYEVRSYLGWYRHITLVLLAAAFLVDITVQSHRSASASQESAACPALIQLTTSEARHLLAHLFWSAPTSAPLICHWSRFRRTHHYWAGYYHRRRRAKTG

SEQ ID NO: 117 - protein, 468 aa, synthetic construct
MKHHYDTTPEQAEPTLSQMGTWPVSLFHLHARLAPRFARSEPRRRALRYLHAVISDIPRKNGWQIAEHAKELRPYGMQRLLSQAVWDHDGVRDDLRSFLCQALSPPALSAEPPEPAAPLPVLVMDESGFPKRGRHSAGVQPQYCGSTGRIENCQVGVFLSYVTAQGHGLIDRELYLPQEWCDDPARRLAAHIPEAVTFQTKPELAQRMLERAQAAGLPIDWVVADTIYGHCPELRAFLQAQGYAYALAVPSIEVICVQTPQGCLLNSVASIAQQALGPADWQRLSQSLGTKGERLFDWAILPWFQGGGVDGRHFLVVRRCLDDPNELAYYLVFAPLDTTLPTIVQAIGARWRIEEDLQTGKDLGLDQYEVRSYLGWYRHLTLVMLAAAFLVSIAVHENRPRAAPSPTSVAVPAPTVIALTTREVRHLLARLIWPAPTSAALICQWSWWRRTHQYWAGYYHRRRRHKAG

SEQ ID NO: 118 - protein, 473 aa, synthetic construct
MSIRNEKGMKHHHHTTREEAGPTLGAIGSWPLALIDLHERLAAYFARPEPRRHALLYLQAIMSDIPRKNGWQIAEHARQPRPYGMQRLLSRAVWDEEGVRDELRAFVCQTLNPPPVGPAPASPEALFPVLVLDESGFPKRGTHSAGVQQQYCGTTGRVENCQVGVFLSYVTALGHALIDRELYLPEDWCHDLPRRQAAHIPQTVPFQTKPELAKLMVERAQSADLPIRWVVADTVYGHSPDLRLWLEEQGYAYALAIPCTEVVCVQTQEGYLLADVGSLAQRALCAQDWQRLSQSQGTKGERLFDWAILPVVHRGVVDHRHWLVFRRCLDSPFELAYYLVFAPLATPLPTMVQAIGARWRIEENLQASKDLGLDDYEVRSYVGWYRHITLVMLASAFLVGICVQDSSHQCPQEGPTASPPLIPLTPSEVRHLLARLFWPAPTSAPLICQWSWWRRAQQYWAGYYHRRRREKAG

SEQ ID NO: 119 - protein, 419 aa, synthetic construct
LLYLQAVLSDIPRKNGWQIAEQAKQARPYGMQRLLSRAVWDEEGVRDDLRIYVWHYLSPPPIVSDRAEPEALFPVLVIDESGFPKRGSHSAGVGRQYCGATRRVENCQVGVFLSSVTARGHALIDRELYLPEDWITDPGRRQAAHIPQTVRFQTKPELAQRMVQRAQEAFLPIRWVVADTVYGHSPDLRVFLEAQGYAYALAVPSTEVVCVQTQQGCLLNDVASIAHHVLTAQDWQRLSQSQGTKGERLFDWAILPLLHRGMVDGRHFLVIRRCLDDPDELAYYLVFAPLATPLPTIVQAIGARWHIEEDLQASKDLGLDHSEVRRYVGWYRHITLVMLAYAFLVGICVQDRSHEDPQAWPTAWAPLIPLTTSEVRHLLARLIWPAPSHAPLICWWSWWRRAHQYWAGSYHRRRRQKAG

SEQ ID NO: 120 - protein, 479 aa, synthetic construct
LFELSIRNENGMKHHQHTTAEQAGPPLGEIGTWPLSLLQLHQRLGPRFARPEARHHALLYLQAILSDIPRKNGWQIAEHARQPRPYGMQRLLSHAVWDEDGVRDDLRTFVCQTLHPPPLLPPSAANAQVFPVLVIDESGFPKRGRHSAGVQPQYCGISGQVENCQVGVFLSYVTALGHALIDRDLYVPEDWCHDLPRRRAAHIPDTLTFATKPELAKRMVQRVQAAGLPIRWVVADTVYGHSPHLRDFLEEQGYAYAFAVPSTEVVCVQTRADILLADVASIAHQALRAQDWQRLSGSLGTKGERLFDWARLPVVHGGAVDGRHWLVLRRCLDDPNELAYYLVWAPPDTPLPIMVQAIGARWHVEEDLQATKALGLDQYEVRSYRGWYRHVTLVLLAYAFLISICLQAHRPLPAPATDSGARPSPPLLALTPSEVRHLLAHLIWPAPTSAPLICQWSWWRRIHQYWAGYYHRRRREKAG

SEQ ID NO: 121 - protein, 459 aa, synthetic construct
MKLLHHTTDQELRPSLQQIGKWPLALSQLHQRLAPYFARPEPYHHALLYLQAILSEIPRKNGWQIAEHARQARPYGIQRLLSRAVWDQDGVRDVLRTQVCQFLHPPPEPAAIFPVLVIDESGFPKRGKHSAGVGHQYCGCTGRVENCQVGVFLSYVTATGHTLIDRALYLPEDWCDDPVRRQAAHIPEHLTFQTKPELALQMVHRAQSAGLPIRWVVADTVYGHSTDLRVFLEAQGFPFALAVPANEVVCVQTSQGYRLCDAASIEQQVLGKEDWQRLSMSQGTKGERLFDWAILPQVLHGTVDSCHWLVIRRCLDAPFEKAYYLVFAPPGTTLQTMVLAIGARWSIEVDLENAKDLGLDQYEVRSYLGWYRHMTLVMLAAAFLLSICVQDSCQPCQPEASASSPTLIPLTTSEVRHLLARLIWPAPSSAPLICQWSRFRRAHQYWAGYYHRRRREKAG

SEQ ID NO: 122 - protein, 359 aa, synthetic construct
MSLLHLHQRLRPHFARPEVHQHALLYLQAILSDIPRKNGWQIAEQARQGKPYGMQRLLGRAVWDEDGVRDDLRTLVCQSLHPPSLLPASPVFPVHVIDESGIPKRGRHSAGVAPQYCGATGQVENCQVGVFLSYVTALGHALIDRELYLPEDWCSDQPRWQAAHIPQTVAFATKPELAQLMLQRAQVAGLPIGWVVADTVYGHSPTLRAWLQEQGYPYALAVPCTEVVCVQSRAGILLSDVASIAQQALRGRDWQRLSQSIGTKGERLFDWARLPIVHGGLVDGRHWLVIRRCLDDPNELAYYLVYAPLQTPLSIMVQAIGARWHVEEDLQATKALGLDQYEVRSYRGWYRHITLVLLA

SEQ ID NO: 123 - protein, 465 aa, synthetic construct
MTLPEHTTPAPLGPTLGEISRWHEHLRQLHARLRPHFARPEAHQHALRYLQAVLSDIPRKNGWQIAEQARQARPYGIQRLLSAAVWDQDAVRDDLRALVTASLSAPLPCQQEPADEAPFPVLVLDESGFPKRGRHSAGVGPQYCGRTGRVENCQVGVFLSYVTARGHALIDRELYLPEDWCADPARRLAAHIPEAVRFATKPELGQRMIERTTSAGLPIRWVVADTVYGHSPELRLFLEKQGYAYALAVPSTEVVCVQTRTGLLLSDVASIAQQALRAQEWQRLSQSLGTKGERLFDWARLPVVQAGVADGRHWLLVRRCLDNPNELAYYLVWAPPDTPLPTMVQAVGGRWHIEEDLQAGKALGLDHYEVRSYLGWYRHITLVLLASAFLVSITVQSHLTTAAPQESVTCTALIPLTPSEARHLLAHLIWPAPTGAPLICQWSWWRRAHQYWAGYYHRRRRQKAG

SEQ ID NO: 124 - protein, 459 aa, synthetic construct
MKLLHHTTDQELRPSLQQIGKWPLALSQLHQRLAPYFARPEPYHHALLYLQAILSEIPRKNGWQIAEHARQARPSGIQRLLSRAVWDQDGVRDVLRTQVCQFLHPPPEPAAIFPVLVIDESGFPKRGKHSAGVGHQYCGCTGRVENCQVGVFLSYVTATGHTLIDRALYLPEDWCDDPVRRQATHIPEHLTFQTKPELALQMVHRAQSAGLPIRWVVADTVYGHSTDLRVFLEAQGFPFALAVPANEVVCVQTSQGYRLCDAASIEQQVLGKEDWQRLSMSQGTKGERLFDWAILPQVLHGTVDSCHWLVIRRCLDAPFEKAYYLVFAPPGTTLQTMVLAIGARWSIEVDLENAKDLGLDQYEVRSYLGWYRHMTLVMLAAAFLLSICVQDSCQPCQPEASASSPTLIPLTTSEVRHLLARLIWPAPSSAPLICQWSRFRRAHQYWAGYYHRRRREKAG

SEQ ID NO: 125 - protein, 435 aa, synthetic construct
MSLLHLHQRLAPHFARPEVRQHALLYLRAILSEIPRKNGWQIAEHAREERPYGMQRLLSRAVWDQEGCRDELRALVRQALSPPPLVPASVEHEPLYPVLVLDESGFPKRGRHSAGVAPQYCGVSGRVENCQVGVFLSYVTEGGHALIDRELYLPDDWCADLPRRRAAHIPDTLSFATKPELAKRMVQRAQAAGLPIRWVVADTVYGHSSDLRNWLEEQGYAHALAVPSTEVVCVQTRAGLLLADVASIAQRALRAQDWQRLSASQGTKGERRFDWARLPLVHRGEVDGRHWLVFRRCLDDPHELAYYLVWAPADTPLSTMVRAIGARWHIEEDLEVSKDLGLDQYEVRSYLGWYRHITLVLLAYAFLVSICVQATHPLPAQALIALTPSEVRHLLARLLWPAPTSALLICQWSWWRRTQQYWAGYYHRRRRQKAD

SEQ ID NO: 126 - protein, 465 aa, synthetic construct
MTLPEHTTPAPLGPTLGEISRWHEHLRQLHARLRPHFARPEAHQHALRYLQAVLSDIPRKNGWQIAEQARQARPYGIQRLLSAAVWDQDAVRDDLRALVTASLSAPLPCQQEPADEAPFPVLVLDESGFPKRGRHSAGVGPQYCGRTGRVENCQVGVFLSYVTARGHALIDRELYLPEDWCADPARRLAAHIPEAVRFATKPELGQRMLERTTSAGLPIRWVVADTVYGHSPELRLFLEKQGYAYALAVPSTEVVCVQTRTGLLLSDVASIAQQALRAQEWQRLSQSLGTKGERLFDWARLPVVQAGVADGRHWLLVRRCLDNPNELAYYLVWAPPDTPLPTMVQAVGGRWHIEEDLQAGKALGLDHYEVRSYLGWYRHITLVLLASAFLVSITVQSHLTTAAPQESVTCTALIPLTPSEARHLLAHLIWPAPTGAPLICQWSWWRRAHQYWAGYYHRRRRQKAG

SEQ ID NO: 127 - protein, 440 aa, synthetic construct
LHQRLSPRFARPEVRQHALLYLQAILSSIPRKNGWQIAEHARQARPYGMQRLLSRAVWDEEGVRDDLRALVCQTLNPSPALPERPESSGLFPVLVLDESGFPKRGRHSAGVGPQYCGITGRVENCQVGVFLSYVTALSHALIDCELYLPEDWCADLPRRHATHIPDSLSFRTKPELGKQMVERAKSAGLPIRWGVADTVYGHSLDLRLWLEEQGYAYALAVPSIEVVCVQTKAGILLSDVVSIAKQALRTRDWQRLSQSLGTKGERLFDWARLPVVNAGVVDGCHWLVFRRCLDNPDEVAYFLISAPPDTSLSTIVQAIGSRWHIEEDLKATKALGLDHYEVRSYLGWYRHLTLVLLAYAFLVSVTVQARQAEDASAEDKSARPSPPLIPLTPSEVRHLLAHLIFPAPTSTSLIWQWSWFRRHHQYWAGYYHRRRRAKAG

SEQ ID NO: 128 - protein, 475 aa, synthetic construct
MSIRNEKSMKHPEHTTAEQATPTLAEIGRWSLRLRQLHERLRPHFARPEPLHHALLYLQAIISDIPRKNGWQIAEHARQLRPYGMQRLLSQAVWNEAGVRDELRTLVCQTLKPPAILPQPQPAPREALFPILVIDESGFPKRGNHSAGVQRQYCGVTGRVENCQVGVFLSYVTARGHGLIDRELYLPQDWCQDAARRQAAHIAETVPFQTKPELAQLMVQRAHAAGLPIRWVVADTVYGHSPDLRLFLEEQGFASALAVPCTEVVCVPTQTGFRLADVACLAHELLGPQDWHRLSASLGTKGERLFDWAMLPLVHQGTVDGQHFLVVRRCLDGPHELAYYLVFAPLATPLSTIVQAIGARWHIEEDLEVSKDLGLDHYEVRSYLGWYRHVTLVLLASAFLLDLCVQDSHPPDAHQEPPPGTPLIALTTCEARHLLARLIWPAPTSAPLICQWSWWRRGHQYWAGHYHRRRREKAS

SEQ ID NO: 129 - protein, 468 aa, synthetic construct
MKHSQHTTPAQTEPTLSQIGTWPVSLFHLHARLAPRFARSEPRRHALLYLQAVISDIPRKNGWQIAEHAKELRPYGMQRLLSQAVWDHDGVRDELRAFLWQALSPPAWSSEPPEPTAPLPVLVMDESGFPKRGRHSAGVQPQYCGSTGRIENCQVGVFLSYVTAQGHGLIDRELYLPQDWCDDPARRLAAHIPQSVTFQTKPELAQRMLERAQAAGLPIDWVVADTVYGHCPELRAFLQAQGYAYALAVPSIEVIGVQTQQGCLLSSVASIAQQALGPQDWQPLSQSLGSKGERLFDWAILPWLQGGDVDGRHFLVVRRCLDDPQELAYYLVFAPLATTLCTIVQAIGARWRIEEDLQTGKDLGLDQYEVRSYLGWYRHLTLVMLAAAFLVSIAVHQNRPRAAPSPTSVAVPAPTVIVLTTREVRHLLARLFFPAPTSAALICQWSWWRRTHQYWAGYYHRRRRQKAD

SEQ ID NO: 130 - protein, 411 aa, synthetic construct
SDIPRKNGWQIAEHARQPRPYGMQRLLSRAVWDQDGVRDELRACVCQTLHPPPVEPGRAEPAALFPVLVIDESGFPKRGRHSAGVGRQYCGATGQVNNCQVGVFLSYVTALGHALIDRELYLPEDWCHDLPRRQAAHIPQTVTFQTKPELAQLMVHRAQSAGLPIRWVVADTVYGHCPDLRLFLEEQGFSYALAVPSTEVVCVQTQADYLLSDVGSIAHRTLRAQDWQRLSQSLGTKGERFFAWAMLPLVHRGVVDHRHWLVFRRCLDDPDELAYYLVYAPLNTPLPIIVLAIGARWRIEEDLEASKDLGLDQYEVRSYVGWYRHITLVMLASAFLVSICVQDSSHQCPQEEPTPAAPLIPLTISEARHLLARLIWPAPTCAPLICRWSWWRRTHQYWAGYYHRRRREKAG

SEQ ID NO: 131 - protein, 344 aa, synthetic construct
VIRGFPKRGRHSAGVAKQYCSATGQVENCQVGVFLSYVTSLGHTLIDRELYLPEDWCHDATRRQAAHIPQTVPFQTKPELAKRMVQRAQSAGLPIEWVVADTVYGHSPDLRLWLEEQGYPYALAVPCTEVVCVQTKAGCLLSDVASIAHRVLTAPDWQRLSQSQGTKGERLFDWAILPLVQQGTVDGRHWLVFRRCLDEPFELAYYLVFAPLATSLPTMVQAIGARWRIEEDLEANKDLGLDHYEVRSYVGWYRHITLVMLATAFLVGICVQENPPLPAEHEAPLAPPVQALIALTTSEVRHLLARLIWPAPSGALLICQWSCWRRAHQYWAGYYHRRRRLKAG

SEQ ID NO: 132 - protein, 491 aa, synthetic construct
MIDYHTFCQIRLLRDERGLSIRQICRELKLDRKTVRRWIQRQRFEPRQQATKRPSKLDPFRGQIVQLLQQHPYTVPQLLQRLRAEGYTGSYTILRVFARQICPKRPPAFLTLHFAPGECAQVDWGSAGVMAVGSTRRRVSFFAMVLCYSRQLYVEFTLGEAMEHWLACHQNALVYFQGVPAQIMVDNCKVAVLSHPVGQPAVFHPHYADFAAYYGFAIKACGVRQAQQKGRIERSIGYIKQNFLAGLELTNLAALNAAARQWLDTVANVRVHGQTQKRPVDLLAQERPKLRPLHPYPYDTATTKTVGSRKIFRVIFDTNRYSVPVRYAGASLKLKVDPDRLRIYHQEQLIAEHVRSYDRHQDFEHPDHAQPLLLQRRQAKEQQLLVRFLALGNAAAEYYQQLESRHLNARHHARQILALVEVYGLEPVQQALADALHYRAFSSQYIANLLHQWQHPTPEPGALHLTRPTDLLQLELPDPDLSLYQTPGGEV

SEQ ID NO: 133 - protein, 492 aa, synthetic construct
MIDYETYMKIKTCHEKEGLNCNQISSITGLSFKTVSAWLSEERYRMRKTIDRSSKLDPFKDQIIQMLEKYPYSAAQVFLRIKDNGFTGGSTIVKDYVRKMRPSRTKAYLKLSFAPGECGQADWGSFGSVKVGSTTRRLSFFVMVLCYSRMMYLEFTVSQTMEHFLNCHKNAFEFFGFVPKKIMVDNLKSAVLSRIIGQAPVFNPRYFDFAKHYGFDITPCNVRAGNEKGRVENAVGYVKKNFLNGLDIPDFSAIHPASRLWLDSVANVRIHGETHQKPIDLFEKERPCLNPLPLNPFDVANVLQVRASSQFRITFDANRYSVPAEHAGERLTLKAYPDRLCIYKNDNLIARHPRSYDRYQDFEDPDHPKALLAQRRKAKEQKIYMRFLSLSPKAEHYCMMLLQKRLNPNHHIRKIVALSEIYPLDAVARAIEDALHFQAFSSEYIANILASRSRLLPEPGALHLTRNKDLLDIDIPKPDLSIYERTNHEDKD

SEQ ID NO: 134 - protein, 495 aa, synthetic construct
MIDYETYCKIVQLHQKRLRIGQIARILGIDERTVAYWIEEGAYRPRKTPKRASKLDVHKPQILRWLEQYPYTGAQLLLRLREEGYQGGKSVVNEYLAKMRPRKVKAFLTLSFAPGECAQVDWGQFGTVPVGSTRRTLSFFVCVLCYSRLMYVEFTVSQSMEHFLACHQNAFEFFGFVPKAVMVDNLKSAVIRRLIGQAPVFNPRYQDFARHYGFTIKACGVGKGNEKGRVENAVGYIKKNFLGGLDIPDFNAVNPAARQWLAEVANVRVHGATRQKPLELFSAEKPAMLPLPAQPYDTGTPRPVRASNRFRVVVDTNRYSVPAEYAGARLLLKSYADRLCLYHNGELVARHVRRYDRYQDVEDPDHPKALLQQRHAAREQRLLMQFLKLSPKAEEYHRQLAERRMNPRHHLRQIVALSEIYGRDKVARAIEDAFLCQAFGCHYIANILEQRERILPEPGALHLTRRQDLLDLELPEPDLSIYDPQTDEQQGETRR

SEQ ID NO: 135 - protein, 502 aa, synthetic construct
MIDYETYCKIVQLHQNRLRIGQIARILGIDERTVAYWIEEGAYRPRKTPKRASKLDVHKPQILRWLEQYPYTGAQLLLRLREEGYQGGKSVVNEYLAKMRPRKVKAFLTLSFAPGECAQVDWGQFGTVPVGSTRRTLSFFVCVLCYSRLMYVEFTVSQSMEHFLACHQNAFECFGFVPKAVMVDNLKSAVIRRLIGQAPVFNPRYQDFARHYGFTIKACGVGKGNEKGRVENAVGYIKKNFLGGLDIPDFSAVNPAARQWLAEVANVRVHGATRQKPLELFSAEKPAMLPLPAQPYDTGTPRPVRASNRFRVVVDTNRYSVPAEYAGARLLLKSYADRLCLYHNGELVARHVRRYDRHQDVEDPDHPKALLQQRHAAREQRLLMQFLKLSPKAEEYHRQLAERRMNPRHHLRQIVALSEIYGRDRVARAIEDAFLCQAFGCHYIANILEQRERILPEPGALHLTRRQDLLDLELPEPDLSIYDPQTDEQQGEHDDDDQDPQG

SEQ ID NO: 136 - protein, 492 aa, synthetic construct
MIDYPTFCQIRMLLDEKHLTAAQVAAELQLDPKTVAKWAEQSRYQPRRGGKRASKLDAFKGRIVGLLERHPYSAQQVLQEIKPQGYAGGYSILKEFVRLVRPVRKPAFLMLEFAPGECAQVDWGSFGSVTVGTTKRHLSFFVMVLCYSRLLYVEFTLSEGMEQFLSCHRHAFEFFGGIPAKVMIDNLKVGVLDHPLGAEARFNPRYLDFAAHHGFVPVACQVKKANEKGRVENGVGYVKKNFLSGLQIPSFEAVNPAARQWQDTVANVRIHGETHVKPLERFAQEKPLLKALPLRPYDCGVVRPTSANSCCRVVFETNRYTVPHLYASQQLSLKVYPDQLLCYHHEKLIATHLRGYERRQDIRNPDHIQELLTQRHRARDQTCLQAFLSLGPQAELYGRKLREKRFNAPHHIQKIVALSQLYGPDKVARALQDALTFDAYGCEYIANLLEQRERHAVAPSPLHLTRRQDLLELDLPPADLSPYDPNPSSPQP

SEQ ID NO: 137 - protein, 557 aa, synthetic construct
VGQQVSFPTFRTIVGHFFSFASYLCLVNNLNKDLMAGKIVSMSKIKQVLQLYDSKHYNREIARLIGLNKDTVNKYVNTFIESNKSLEELLKLEDPELEKLFNSGTPAYTDTRHKDFLNELPYLKKEIQRPHVTKYLLWEEYINKYPDGYRKSQFYYHLKQNINAAKPTTVLTGSYKPGEKLFVDFTGDTMSYTDLETGNTIKAQVFVACMPFSDYLFTICVPSQKVEDFLYAISKSFEFIGGIPKILVPDNLKSAVIKADRYDPTLNKALEDMGNYYHFVVIPCQPYSPTQKALVEDGVKTTYNRIMAKLRNRTFYSLNEINQAFQEKTLELNQTRMQRHDYSREERYVATEKDKLGPLPIRPYEMKYHRELLVHQNGFISLACDNHYYSVPYTLIGKKAKVIYTRSLVKIYIDGNLVASHERVKGFGYSKKDKHLAPNSLAILNRSPELYIKRSTSVSKDFGELITTIFSVCKKQKMVPEFYYKTCALLFHLHRISKDDDFNAACKIALDNKIYKGSFFKSVLSNIKNAKKLIDKKEFQNPLPSNHENMRGNEYYL

SEQ ID NO: 138 - protein, 492 aa, synthetic construct
MIDYETYMKIKNYNENEGLNCNQISAITGLSFKTVSKWLDEDRYRMRKPADRSSKLDPYKNQILQMLEKYPYTAAQIFLRIKDNGFDGGYTIVKDYVRKMRPKKYKAYLKLSFAPGECGQVDWGSFGSVNVGSTTRRLSFFIMVLCYSRMMYLEFTVSQTMEHFLNCHKNAFEFFGSVPEKIMVDNLKSAVLSRAIGQAPVFNPRYLDFAHHYGFGITPCNIRAGNEKGRVENAVGYVKKNFLHGLDIPDFSAIHPAAKLWLDNVANVRIHGETHKRPVDIFEEERPSLNPLPLNPFDVATVLQVRASSQFRINFDSNRYSVPAEYAGEKLTLKACPDRILLYKDQKLIANHPRCYDRYQDFEDPDHPRVLLAQRKKARDQKIYMRFLTLSPKAEQYYLMLEQKRMNPKHHLQKIVALSEIYPPDEVARAIEDAFEFQAFSCEYIANILEMRARCLPEPGALHITRNQDLLDIDIQKPDLSVYERKNHEEKS

SEQ ID NO: 139 - protein, 557 aa, synthetic construct
VGQQVSFPTFRTIVGHFFSFASYLCLVNNLNKDLMAGKIVSMSKIKQVLQLYDSKHYNREIARLIGLNKDTVNKYVNTFIGSNKSLEDLLKLEDPELEKLFNSGTPAYTDTRHKDFLNELPYLKKEIQRPHVTKYLLWEEYINKYPDGYRKSQFYYHLKQNINAAKPTTVLTGSYKPGEKLFVDFTGDTMSYTDLETGNTIKAQVFVACMPFSDYLFTICVPSQKVEDFLYAISKSFEFIGGIPKILVPDNLKSAVIKADRYDPTLNKALEDMGNYYHFVVIPCQPYSPTQKALVEDGVKTTYNRIMAKLRNRTFYSLNEINQAFQEKTLELNQTRMQRHDYSREERYVATEKDKLGPLPIRPYEMKYHRELLVHQNGFISLACDNHYYSVPYTLIGKKAKVIYTRSLVKIYIDGNLVASHERVNGFGYSKKDKHLAPNSLAILNRSPELYIKRSTSVSKDFGELITTIFSVCKKQKMVPEFYYKTCALLFHLHRISKDDDFNAACKIALDNKIYKGSFFKSVLSNIKNAKKLIDKKEFQNPLPSNHENMRGNEYYL

SEQ ID NO: 140 - protein, 494 aa, synthetic construct
MDSAQIDEIYRLHHEQKWSIRKISHKLHVARKSVKKYLRSPAGVPAVRKPRKTKLDTFKPVIREFIEKDPEASAVVIADRLRPLGYTGQITILRMYLKTLRQALHAPRAFIRIESSPGDCFQVDWGHFGALDYNGDKRKLYAFCCIECHSRRLYIEFTHSQSFETFVRCHIHAFRDMKGAARECLFDNLPSAVAEHDGRIVRFNPRFLAFAREYNFYPRACNKAAGWEKGKVERGAVRYLRQNFWPLRTIADLADCNRQARQWLDETANQHVHFETRERPADRFRPEALRPLPDIDPDYRDTVTARIHKDIRLRFDGNFYCVPPRYVGQLLTVKADSSSVTIYDSEREIVRYLRSWRRGQTFGAERFEKELIEQRPGAQRSRAQQRLITLLGSRTEPYLRCLAETDRSLARQIQELLALVRQYGPEAVAAALDKAHKAGAFGADYIANILLQEHSPREQQPPLLLKDPLLNELTTDPLSLLQYDAYILTDRRES

SEQ ID NO: 141 - protein, 491 aa, synthetic construct
VIDYETFAKIHDCHDRQGLTIAQTTRALGLDSRTVATWVARSRFEPRRSRPRGSVLDPFKPRITRLLDTHPYSAQQIFQRLREEGYRGGVTILRDYVRRIRPTKRPVYLKLHFAPGECAQVDWGAYGTVAVGNTRRRLSFFVMVLAFSRQMFVEFTVSQTMEHFLACHEHGFAALGGVPSKIMVDNLKSAVLQRLAGAAPVFNPRYLDFARHHGFAIEACNVARGNEKGRVESGVGYVKKNFLHGIELTDFSTIQAAAQVWLDTIANVRIHGETQQRPVDLFAQERPHLGSLNPHPYDIAITSTSVASSQFRITLDTNQYSVPAAYAHRRLTVKAYPDRVCIYFDNQLIARHTRRYGRHEDIEDPDHAKGLIAQRSRAREQRLMMHFLALSPDAQAYYDGLEQRRLNARHHVRKILALAEIYPVDAVARAISDGLAFQAFSAEYITNILETRARALPEPGPLQLTRRHDLLDIDIAPPDLNAYEVNDHDPE

SEQ ID NO: 142 - protein, 497 aa, synthetic construct
MPGKRITDHQVHKYKQHRNQLSQGASAAKAGISERSARRIEHAPSLPSQRPQRNWRTRQDPLNSAWDSEIVPLLQNDVHLNAVTLLEELQGRHPGQWDTSVLRTLQLRMRLWRAQFGAEREVYFAQEHPPGRQGISDFTVADALNVEIAGAPFKHRLYQFALAHSGWRHVTIIDTGESFLALSTGLQAALWALGGSPEEHRTDSLSAAFNNLAEQEELTQRYADLCLHYGLRPTRCNPGQSNENGSIEARNNSLKKALDQALRLRGTRSFETRADYEAFVDTVVQRMNARVAQRLATERTMLKPLPVRRTAEFEEIPARVSKFAIFTLKGVLYSVPSQLIGHRLMVRQYAQHVEGWLGGQCVVSLPRAKPVQGQRVGRSIDYRHLVGALKRKPGAFARWVLRDAAFPRAVYCQTWERLSAQRPEREACKTMVGLLVLAADGHEAQLAQELQQLIELDQLPDLSALSLLLQPPSADVPQVVVKLPTLADYDELFGVAA

SEQ ID NO: 143 - protein, 470 aa, synthetic construct
MKSSHHTTDQEIRPSQQEIGSWPLALIRLHQRLAPYFARPEPRRHALLYLQAILSEIPRKNSWQIAEHAKQARPYGMQRLLSRAIWDEEGVRDEVRTFILHCLSPPSLLQSGEQSPAVSQAPFPVLVMDESGFPKRGTHSAGVQKQYCGATGQVDTCQVGVFLSYVTAAGHALIDRALYLPEDWCTDAARRQAVHIPETVCFQTKPELAKLMVQRAQSASLPIRWVVADTVYGHSTDLRLWLEKQGYFYAMAVPANEVVCIQNAQGAYRLAEVASIEQQELKPQDWQRLSMSQGTKGERYFDWAILPLVLHGTVDGCHWLVIRRCLDDPSQKAYYLVFAPPGTSLHTMVLAIGARWSIEVDLENAKDLGLDQYEVRSYLGWYRHMTLVMLASAFLLSICVQDSSPACQPEEPVPSPPLIPLSSSEVRHLLARLIWPTPSSAPLICHWSWWRRAHQYWAGYYHRRRRLKAA

SEQ ID NO: 144 - protein, 538 aa, synthetic construct
LYYNNQNYSTKMAGKPKDMSLIKQVLQLKKLGDTNREIARKLPINKETVNGYIKLLDANAWSIDSLLAIDDPELDKMFRAGNPAYTDSRMEEFLKNLPYYREQLTSPKLHVSRQVLFEEYKASHPNGYGKSQFYFHLKQNLVAQKDVVAVLANTYTPGQKLMVDFAGDKLRYVDTDTGEIVKVEVFVACLPYSDYTYVICVPSQKTEDFIFAIRMCLEHLGGVPPILTPDNLKSAVIKNDRHEPTLNKALEDMGNHYHFVVLPCDPVSPTQKALVEDGVRITYNRIYAKLRNRTFYSLLDLNKAVWELMAQHNQTRMQKRPYSREERFHAMEKTELKPLPAEIFEMRYAATLKVQVNCHIELRHNKTTHFYSVPHTYVGKQALVSFTRSFVKIYVDNQLVASHRRSFDYGYTTVNEHMASNCRAIMERSAAYYVERAKYISAECYEYVKTIFNPLRTTHPEEVYYKLCTSILSLRGKYKYDVFNLTCKQCREHGIFTYRKFEAVLKNNNLKASEDESVASIAPVPSNGENMRGQAYYK

SEQ ID NO: 145 - protein, 523 aa, synthetic construct
MLDTEQINDLHRLYWSERWSIRKIERHLKMGWRTISKYLEAPARAPALRSRSSKLDSFKGNIAEWLEKDPQVTAAVIEQRLRPLGYDGGSSILQEYVRKVRPQLTPRRAFMRMEPIAGERFEVDWGHFGALDYSGDSRKLYAFALVDAHSRMMYVEFTHGQSFETFVRCHVHAFTELGGVARQIAYDNLATAVAEHDGRIVRFHPRFLGFAREYNFVPHACNPASGWEKGKVERAIGYLRQNFWPLRDFTDLHDVNRQVRQWLGEVANRRMHSETRERPLDRFKPEALRPLPVIPYDYRDSSEATVQKDLRLRFDGNRYCVPHRYVGRKLIIKADAGNVTIYNRVEEVVSYARSWRRGQTFGAERFEKVLAEQRPAARRSQAQQRLLDSLDGMCLRATVEAYLRDMADTDRSLHRQIQELLELIRQYGPEDVADAIGKAAKARAYGADYVANILRQQRSPRRPQPPLRLRDPLLNELATDPISLLEYDAFILDAGKEPDDPTRTETAATEPEGDEPPDRDDDR

SEQ ID NO: 146 - protein, 504 aa, synthetic construct
MDIREILRRIRQGQSDRAIAKEVGIDRKTVGRYHTWAREQGLLDGELPALGELQRLVKEILNNDALPQNVSSVEPYRVLVVKLRKQGVEMAAIHERLKERGYTGSYASVYRFVRRLEPKTPEVTVRVETPPGEEAQVDFGFAGRMVDPETGQQRKTWAFVMTLSWSRHQYVEFVFDQKVATWLQCHRNAFRFFGGVPQRVVIDNLKAGIARACWDEPQAQQGYRECAEHYDFLITPCRPRTPEHKGKVEQGGVHYVKRNFLGGREPTTTTKANQDVLRWVEAVAGQRTHGTTKEKPLERFKMERAALKALPGIPYDLAIWKQAKLHRDCYIVFERAYYSAPFRLVGQQLWVRGGTQTVQVYTSDYHLVATHPCAQTPGQRQTNLDHLPTHKIAGIILSRESCRLRADETGPATRQVVDRMLNHRPEDRLRTAGRLLKLGERFTPRRLEAACARALRFDDPSYITIKHILEQGLDQQGLPQITAFPPAKAFVRTVTELVGHLVGG

SEQ ID NO: 147 - protein, 500 aa, synthetic construct
MKSRKIVFDIHRLKDEGYSVRAIAKILAIGRNTVARYLKHPDRALAPRMKTASKLDPYKEQIDALLEKNPNVSAPVILHRILELGYDGQITILRAYLRQQRGQVKTKKAYIRFESEPGQQFQVDWGHFGTICYGDTNRKLYALVVIESYSRMLYVEFTHSQNQQALHGCLVHAFKSFGGTPKTLVVDNMLTAVTDRQSSLIRFNDAFLDFLRPFHITPRACNPGAPFEKGKVEAAVKYLRRNFMPLREFKNLEEINAQVLEWLNKTANVRVHQTTGKIPKERFEKVNLRALPDLLPEACECSCLTVHKDFAVKFDANSYTTPPWTIGKKLTLKADQQRIWIYYKDKQVVSYPRCWERKRRIETTAHVEQVKKMQRKNWHTKEIAYFASLGEEFREYLEKLPQSNLPLKKQVISLLSLKDQYGIKSLSWAIMKALKHKAYGADYIENILYQEMIPQNQHPPVKLKNDALNRIRLSEPTLSDYDAIALKRRRKHDRRDHRKK

SEQ ID NO: 148 - protein, 491 aa, synthetic construct
VIDYETFCKIHDCHHRHGLTIAQTARFLGIHRSTVAIWLARARFTPRRSRSRPSKLDPFKPSIMRLLDSHPYSAQQIFQRLREEGYRGGVSILRDYVRRVRPPRPAVYLKLHFAPGECAQVDWGAYGSVAVGNTRRRLSFFVMVLAFSRQMFVEFTVSQTMEHFLACHEHAFRAFGGVPAKVMVDNLKSAVLQRLAGVAPVFNPRYLDFARHHGFAITPCNVARGNEKGRVESGVGYVKKNFLNGLELTEFAAIQAAVQVWLDTVANVRIHGETQQRPIDLLMQERAHLGPLNPHPYDSARTFTSVASSQFRITLDTNHYSVPVSYAHRKLTVKAYPDRICIYFDSQLIARHKRHYDRHRDIEDPEHAKGLIAQRRRASEQRLMTRFLALSADAAAYYDGLEQRRFNARHHVRKILALAEIYSPDLVARAISDGLAFEAFSAEYITNILEARTRALPEPGPLQLTRRHDLLDIDIDPPDLNDYKVNDHDTE

SEQ ID NO: 149 - protein, 519 aa, synthetic construct
MAGKITEMSKLKQVLQLHHSGVSNRSIASQLGLYKETVNKYIRQFKGLSIDLQEVLQKDNPELEHLFNGGSPAYVDKRFEDFSKRLPYLEKELTRKHVTRLRLWEEYITEYPCGYGYTQFCFHLNQHAAIQTPSTVLVNTYMAGEKCYIDFAGDPMQYTDMDTGEIIKVQTFVGCLPYTDYAFAICVPSQKSEDFIYAITQMFCFFGGVTKIVVPDNLKSAVTKSDRYEPEINRLMEHLGNHYGFVVLPARPGKPKDKCLVENQVKLLYQRVYAPLRNRMFFSLEDLNKAVFEQIRLHNRKRMQQRPYSREEHFISDEKRTLKPLPESRFEVQYDTELTVSANCCIYLGRDKHYYSVPYQYIGQKVKVIYTRTLVKVYLKGKRIATHPRVEGFGYSMLEEHTASHSNAYNKRSVAYYTERAGEKSAVLREFFTLMFASQNVPPEFFYNRCDGLLRLQRITPAAEMEKACRIAMEHKQYTYKFVERVLRNIQAFIEEENAIKKNPEPDNHENIRGAAYYQ

SEQ ID NO: 150 - protein, 528 aa, synthetic construct
MAGTIKDMSLIKQVIQLKQLGESNRGVSRKLSINKGTVNAYVNIIQCNGFNYDELLSKDDPELDRLFHAGSPAYSDPRMADFLAKLPYFKEQLGNPKLHVTRQLLYEEYKAGYPHGYGKSQFYFHLQQNLIAQKDCTAVLTETYNPGEKLMVDFAGDKLSYVDIETGEIIKVEVFVACMPYSDYTYVICVPSQKTEDFLFAIRMCLEYLGGVPPILTPDNLKSAVITNDRHEPKLNKALEDMGNHYHFVVLPCDPKEPTQKALVEDKVQTTYNRIYAKLRGRTFYSIVELNRAVWDLLSLFNKTRMQKRPYSREERFHAAEKDKLKQLPQKIYEMKYYANLQVQTNCFVELRQDKVTHFYSVPYIYVGKKALVIFTRSVVNIYIDGTQVATHMRSYEYGHTYIKEHLASNCRAIMERSASYYITWASHISPECRNYISEVFNPQRTSQPEEVYYKLCASIMSLSRKYEVAIIDKTCRQCRECKVFSYRKFEAILKHNSLIASEDEPTRCFEAPIPKDHANMRGSNYFK

SEQ ID NO: 151 - protein, 522 aa, synthetic construct
MLEPQQISRIHELHHQKWSARRIARQLGISRNTIAQHLASPERLTSPSPQPTASTTSSNKRSSKLDPFKPIIDEWLEQDARISCRLVFEKLQKHADGFDCGYTLVKDYLQARRERASRQRRAFMRLEPLAGERFDVDWAHFDSLDYDGEKRKLYAFCMVECHSRMLFVEFTHSQSLETFLRCHVHAFRFFGGVTQEIWYDNLATAVAERDGNLIRFNPRLFAFAKLYRFTPRACHVAAGWEKGKVERAIGYLRQNFWPLRSFRNLEDVNRQVSEWLDGTANVRTHAETRQQPRDRFRADCLRTLPDIDADYRDVATPIVHKDLRLWFDSNRYCVPPSAVGRRMTVKADASSVTIYDQDVELVTYPRCWSRAQTVGADRFRKAVLAQLPKAARSIAQQRLLHLIGEEVEEYLRGIAEQGNRSLHRQMQELLVLTRDFGPTAVKQALHRALQAKAFGAEYVANLVQQSLAPRLAQPPLPLKQLSLLDLVPDPLSLQEYDALLLPSAVAAADNRNSTSAEVLAHE

SEQ ID NO: 152 - protein, 495 aa, synthetic construct
MIDRHTVFEIHRMANEGLSERKISKRLHLDRKTVKKYLNEPNPEKQIIKRASKLDPFKEHISILLEKDCKASSSVIFQHLQKKGFDGKITILRDYLNKVRPNHIKKQVFTRFESPPGHQCQIDWGHFGSISYGVHNRKLYCFAVIECHSRLLYLEFSHSQKQAMLHSCLLNAFSFFNGVCEELVHDNMLTAVIEHVGPLVRFNGAFLEFLRPFKITPRACNVRKPHEKGKVEKGAIHYIRHNFWPLRSFKDLNDLQGQANEWRDQVANKRIHSTTGERPVDRFKEESMHPLIKPLPDCRETESAKVHSDFSIRFDGNRYTVTPWAIGKQVVIKADLNTVTIYYKDRYIATHSRCWKRRERIELPEHKRAALESQKRYWKSEETGLFISMGEAAKTYLERLAATSEPLGKAIKKLLELRDEYGSYSLVEAIKKATLHNAYGAHYIENILYQEMTPTREHLPVRLKKENLNRIRLEEPSLAEFDTFVLEKNKHERNR

SEQ ID NO: 153 - protein, 468 aa, synthetic construct
MKSPQYTTPQQAGPSLSAIGAWAMSLFQLHQRLSPYFARPEVRAHALLYLQALPSDIPRKNGWQIAEHARQARPYGMQRLLSRAVWDEDGVRDELRALVCQSLHPPPLMPAAPDSEPLFPVLVIDESGFPKRGRHSAGVGPQYCGRSGRVENCQVGVFLSYVTALGHALIDRELYLPEDWCSDLPRKQAVHIPETVPFQTKPEQAKLMVQRAQAAHLPIRWVVADTVYGHSPDLRLWLEEQGYAYAMAVPSMEVVCVQSRAGPLLSDVASIAQQALRPRDWQRLSASQGTKGERFFDWARLPVVHAGTVDGRHWLVVRRCLDEPNELAYYLVWAPPDTPLPIMVQAIGARWSIEEDLQASKALGLDQYEVRSYQGWYRHITLVLLAYGFLLSICVQAQQAGDAPAEDPTARPSSPLIALTPSEVRHLLAHLIWPAPTSALLICQWSIFRRTHQYWAGYYHRRRREKAG

SEQ ID NO: 154 - protein, 516 aa, synthetic construct
MERLAMDRIRDVIHRLRLGDSERRIARDTGLSRGVVRKYHQWAKKQGYLDASRPLPDEPALYEVLGESPSPPAQQSSVEPFAEVVKDLLDQGCQMTAICARLQQDHGFTGSYSAVRRFVHRIRPKEPDVTVRVSTAPGEEAQVDFGSVGMLRDPQSGEMRAAYVFVATLSYSRHQYAELVFDQKSPTWIALHRHAFESWEGVPKRVVPDNLKAAVRKAALYDPIPSKAYRSMAVHYGFAISPTRPHTPQHKGKVENGVKYVKNNFMAGQEFTDINVANQRLKVWVRETAGRRIHGTTREQPLARFERKEKAALRPLNKAPFELCEIRLAKVHKDCHIQVYNSRYSVPWKFVAEKVEVHIYQKTVQIFDNDNHELLATHLRAEREGTTRTIMEHYPEELCQYLLLRDSVCQKKARDVGPATTQVVEFLLADHPVDHLRQVQGLLKLTQSVGPERVEAACKRALHYENVHYRSIKEILNKALDRDPLPDEETKPPVSEHTFARSADEFFPPDPEEEER

SEQ ID NO: 155 - protein, 495 aa, synthetic construct
MVTDGKTIEAIYRLSHEQKLSGREIARQLHVTRRTIGKYLQNPLAKVTVRKLRPSKLDPFKPVIRELLEQWPRASAVVIGQRIRSLGYTGGRSILQEYLATLRQIQTPTRAYIRIESSPGECFQIDWGHFGAIDYQGDKRKLYAFCCIECHSRRLYVEFTHSQCFETFVRCHIHAFQFMGGRANECLYDNLVTAVSEHDGRMVRFNPRFLAFARELGFYPRACNKGAGWEKGKVENSIGYLRKNFWPLRTFTDLADVNSQVRQWLEQIANKRIHRETRQAPDERFRPECLGPLPVLIPDYRDTGGPLVHTDSRLHFDGNRYCVHPRYRGSHLTVRADSQSVAIYDHETEIAHYVRCWRRGQILGADRYQKELLEQRPAAERSAAQRRLVLLLGETGESYLRQLAETDRSLSRQIKELLVLVRQYGPEAVMAAIRKAQSLGAFGADYIANILMQEQSAREMQPLLRLKDPRLNELATDPLSLLDYDALILKSRSES

SEQ ID NO: 156 - protein, 494 aa, synthetic construct
MIDQRMIFEIHRLADEGLSPRKIARMLALSRKTVVKYLKDPNPRRPAVTRASKLDPFTDEIGRMLESAPFVSAVVIRQRLMALGFDGGITIVKDYVRKVRGAGKGKKAFIRFESAAGEQCQIDWGHFGSMAYGNTKRKVYCLAVIESHSRLLYLEFTHSQRQETLHRGLYNAFCFFHGTPRELVHDNMLTAVIERDGSLIRYNERFLAFLRPFKIIPRACNVASPHEKGKVEKGAIHYIRYNFWPLRSFKDLDDLQAQADHWRDEQANRRRHNTTGERPIDRFRPEAMRPLPEFLPDCRDTATVKVSADFAVRFDGNAYSVPPWAVGKQVTVKADNQKVAICFKERSIATHRRSWQRKERIESAAHREATRKHQRRLWHSQDVAALISLGEDAKTYIERLAAARTCLKSNIRRLLALKDEYGAYALVEAMKRAISHSAYGADYIENILYQDMTPQRQHPPVQLKEEHLNRIRLQQPCLAEYDAFVVKRKNKHDE

SEQ ID NO: 157 - protein, 389 aa, synthetic construct
EVFVRVHTAPGEELQVDFGGVGQLYDPSSGRLRRAYVFVATLCYSRHQYAEFVFDQKVPTWIGLHRRAFESWGGVPQRVVVDNLKAAVVKVLVHDPILGEAYRRMAQHYGFLISPTRPYTARHKGKVENGVHYVQRNFMAGRQFLDIHAANQHLQAWVAERAGTREHGTTHQAPLYLFNAYERAALLPLPTAPFTLREVKPVTVHPDCHVSIDKSYYSVPYRYVGQTLDAYVGERVVEVYRGLELIATHERSLQPGEWHTRLEHYPEHKAAYLERTPTYCRQVAARVGEATQQVVETLLGDRPLYRLRSVQAILRLEQTVGAERLEAASARALHFGDPSYRRIKAILNAALDREPLPEPAPAIFVRPHVFARSGTEFFDGEESEEADKC

SEQ ID NO: 158 - protein, 531 aa, synthetic construct
MLNTDRINEIHRLFHGEHWSARKIAHHLHIARKTLRKYIESPVQTPARRQRTSKIDAFKSAVADLLEQDPSASAVVIMQRLRPLGYEGGITVLRNHVRQLRGPVHAPRAFVRMEPGPAERLEVDWGHFGTLDYAGDKRNLYAFCLVEAHSRMLFVEFTHSQSFETFVRCHLHAFEALNGVARECWYDNLLTVVAEHVGTLVRFNPRFLAFARECGFFPRACNPAAGWEKGKVERGGVGYLRQNFWPLRQFTDLSDVNRQVREWLDQVANQRVHRETRQRPCERFRPDCLRPLPALVPDYRDTVEALVHKDLRLQFDGNRYCAPPHLVGQHLTVKADASSVALYHRNQEIVRYPRCWRRGQTFGAERFEKELLAHKAAAQRSQAQRRLIALLVSDCSQETVEAYLRGLADTNRCLSRQITELLQLIRQYGPQAVAAALQKALSARAFGADYVANLLRQQLSPRNPQPPLQLRDPELNQLVTDPLSLLDYDAFIVEARKEPHDSPGTEARTTETGDDEPKAGTDPEGSGGEKP

SEQ ID NO: 159 - protein, 495 aa, synthetic construct
MISYELFCHIRQLAEEQLNAAQIATQLHLDSKTVTKWMARAKYQQRQKVKRPSKLDPFKGQIVTLLEAHPYTSQQIFQRLKSQGYTGGYSILKELVGLLRPVRKSAYLTLAFAPGQCAQVDWGSFGWVQVGSTRRRLSFFVMVLCYSRLLYVEFTLGQSMEWFLACHQHAFEFFGGTPEKVMIDNLKTGVLSHPLGGATQFHPRYLDFAAHYGFKPVACGVRQANEKGRVENAVGYIKGNFLAGLAIPGFDALGPAANQWLREVANVRLHGETRRQPLELFAEEKPRLRPLPVLAYDPALIKTVPVSSRCRVNFDANHYSIPSLYAGQKLTLKVYPDRLCFFYREKLIATHVRSFERRQDVRNPDHERELVAQRIRARQQTLLAAFLNLTPQAQLYYRKLEEKRLNPPHHVQKIVALSELYGPDQVARAIADAIAFEAYGCDYIANLLQQRQTDPATPAALHLTRRQDLLDLELPPSDLSPYQTPPPPKNDDHET

SEQ ID NO: 160 - protein, 517 aa, synthetic construct
MPRNRKETMDIREMLRRLQKGQSDRAIAKAMKMDRKTVSRYHTWATEHGLLGEPLPSLSDLQRLLDETMASSPPPQNTSTVEPYRELVVKLREQKVEIAATYERLKERGYTGSYSSVHRFVRNLEPKDPEVTVRVETPPGEEGQVDFGFAGKMIDPETGKLRKTWVFVMTLSWSRHQYAEFVFDQKVETWLRLHRNAFAFFGGVPERIVPDNLKAAIVRACWNEPEAQQSYRECAEHYDFLIAPCRPRTPRHKGKVEQGGIHYVKRNFLGGREPTTITQANQDGLKWVNTTAGRRIHGTTKEQPLTRFETEKETLRPLPGIPYDMAVWKQVKAGRDCYVNFDNAYYSVPFRLVEQQVWVRGGTHEVQVYTTDYKLQATHSRALQPGQRLTHLDHLPPYKVPGLTITRDTCRQQAAKIGPSTQEVVNRLLDHRPEDRLRAAGRLLQLGERFGPGRLEAACARALRFDDPAYVTIKRILKQGLDDREDLPAVDAPPPAKAFVRTPSELVGHLTGGTSWR

SEQ ID NO: 161 - protein, 489 aa, synthetic construct
MIDYETYVRIRNYFTNDGLKYSQIADELGLDCRTVAKWANEARYLPRRSAKRASKLDPFKNEIVRMLEKHHYTARQVFQRLQAGGFDGGITILTDYVRKIRPPKTTPYLKLVFAPGECAQVDWGSYGNVRVGSTSRRLSFFVMVLCHSRMMYVEFTVSQTMEHFLGCHQNAFHFLGSVPQKVMVDNLKSAVLKRSIGNDPVFNPRYMDFANHYGFKIVPCNVGKGNEKGIVENAVGYVKKNLLNGLAITDFKIMKPLVQHWLDTVANVRTHGETGKRPMDMFTEEKSSLQPLPVEPYDIGVVKQARASRQFRVTIDTNRYSVPAQLAGVGLTLKLYPDRLCFYHENKLVARHVRSYDRRKDYEHPDHPKVLLAQRKKARDQKIFMRFLGLSNKAQDYYRQMEQRRMNPFHHIRQIVALSEIYPPEQVTQAIEDAFHFKAFSCDYIANLLEQRSRQVKEPGALHLTRNSDLLDLTINKPDLSIYDIGGEK

SEQ ID NO: 162 - protein, 532 aa, synthetic construct
MLNLEQINEIHRLAGGEHWSLRRIARQLRLAARTVKKYLVAPVPSPVRRARPSKLDPFKPLIRELLEQDPHAPGAVILQRLQAAGYPGGHTILRDHLQRVRVSHLAPRAFLRMEPGPGERFEIDWGHFGALDYQGDKRKLYAFCLIEAHSRMLYVGFTHSQSFETFARCHQHAFAALHGVSRECWYDNLLTAVAEHDGRLVRFQPRFLAFAREYGFYPQACNPGAGWEKGKVEKGGVAYLRSNFWPLRTFTDLTDVNLQVRQWLDEVANVRLHRETCQRPYDRFRPDTLRPLPALTPDYRDTATVFVYKDLRWHFDANRYCAPPRFLGQHLTAKADASSVTLYDRQGAEIVRYARCWRRGRTLGGERFQKELLEHHPAALRSEAQQRLLKLLQGVCPAETVEAYLRGLADSDRSLLRQLQELLALFRAYRPEQITAALEKALAARAFGADYVANLLHQIASPRETQPPLQLRDPELNQLTTDPLSLLDYDAFILRDRKESVDDTGRETDPTSLDDHGPEAGDADPGSGQPKS

SEQ ID NO: 163 - protein, 494 aa, synthetic construct
MVTDPKTIEAIYRMNHEQKLSGREIARQLHVTRGTIKKYLQDPLAKVIVKKPRPSKLDSFKPVIRELLEQWPRASAVVVGQRIRSLGYTGGRSILQEYLATLRQIRVPSRAYVRIESSPGDCFQIDWGHFGSIDYQEDKRKLYAFCCIECHSRRLYVEFTHSQCFQTFVRCHIHAFQFMGGRARECLYDNLVTAVAEHDGRIVRFNPRFLAFARELGFYPRACNKAAGWEKGKVENSIGYLRKNFWPLRTFTDLADVNAQVRQWLEQIANKRLHRETRQTPDERFRPDCLGSLPPLIPDYRDTDVPLVHTDSRLCFDGNRYCVHPRYRGSHLTVRADSQSVAIYDRETEIARYVRCWRRGQILGVDRYQKELLEQRPAAERSAAQRRLALLLGETGESYLRKLAETDRSLSRQIKELLILVRQYGPEAVMAAIQKAQSHGAFGADYIANILMQEQSAREMQPLLRLRDSRLNDLATDPLSLLEYDALILKRSES

SEQ ID NO: 164 - protein, 494 aa, synthetic construct
MVTDPKTIEAIYRMNHEQKLSGREIARQLHVTRGTIKKYLQDPLAKVIVKKPRPSKLDSFKPVIRELLEQWPRASAVVVGQRIRSLGYTGGRSILQEYLATLRQIRVPSRAYVRIESSPGDCFQIDWGHFGSIDYQEDKRKLYAFCCIECHSRRLYVEFTHSQCFQTFVRCHIHAFQFMGGRARECLYDNLVTAVAEHDGRIVRFNPRFLAFARELGFYPRACNKAAGWEKGKVENSIGYLRKNFWPLRTFTDLADVNAQVRQWLEQIANKRLHRETRQTPDERFRPDCLGSLPPLIPDYRDTDVPLVHTDSRLCFDGNRYCVHPRYRGSHLTVRADSQSVAIYDHETEIARYVRCWRRGQILGVDRYQKELLEQRPAAERSAAQRRLALLLGETGESYLRKLAETDRSLSRQIKELLILVRQYGPEAVMAAIQKAQSHGAFGADYIANILMQEQSAREMQPLLRLRDSRLNDLATDPLSLLEYDALILKRSES

SEQ ID NO: 165 - protein, 545 aa, synthetic construct
MPLVSPAGLPYNGRMLNTDRINEIHRLFHGEHWSARKIARHLHLSRKTLRKYIQSPMQTPAHRQRTSKIDPFKSTVADLLEQDPSASAVVIMQRLRPLGYDGGITVLRNYARQLRGPVHPPRAFVRMEPGPAERFEVDWGHFGTLDYAGDKRNLYAFCLVEAHSRMLYVEYTHSQSFETFVRCHLHAFEALQGVARECWYDNLLTVVAEHVGTLVRFNPRFLAFARECGFFPRACNPASGWEKGKVERGGVGYLRQNFWPLRQFTDLSDVNRQVREWLDEVANQRLHRETRQRPCERFRPDCLRPLPALLPDYRDTVEALVHKDLRLQFDGNRYCTPPHLVGQRLTVKADASSVALYHRNQEIVRYPRCWRRGQTFGAERFERELLAHKAAAQRSQAQRRLIALLVSDCSQDAVEAYLRGLADTNRSLSRQITELLQLTRQYGPQAVAAALQKAHAARAFGADYVANLLRQQLSPRNPQPPLQLRDPQLNQLVTDPLSLVDYDAFIVEARKEPHDSPGTETRTTETADDEPEAGTDAEGSGGEKP

SEQ ID NO: 166 - protein, 489 aa, synthetic construct
MIDYETYVRIRNYFTNDGLKYSQIADELGLDCRTVAKWANEARYLPRRSAKRASKLDPFKNEIVRMLEKHHYTARQVFQRLQAGGFDGGITILTDYVRKIRPPKTMPYLKLVFAPGECAQVDWGSYGNVRVGSTSRRLSFFVMVLCHSRMMYVEFTVSQTMEHFLGCHQNAFHFLGSVPQKVMVDNLKSAVLKRSIGNDPVFNPRYMDFANHYGFKIVPCNVGKGNEKGIVENAVGYVKKNLLNGLAITDFKIMKPLVQHWLDTVANVRTHGETGKRPMDMFTEEKSSLQPLPVEPYDIGVVKQARASRQFRVTIDTNRYSVPAQLAGVGLTLKLYPDRLCFYHENKLVARHVRSYDRRKDYEHPDHPKVLLAQRKKARDQKIFMRFLGLSNKAQDYYRQMEQRRMNPFHHIRQIVALSEIYPPEQVTQAIEDAFHFKAFSCDYIANLLEQRSRQVKEPGALHLTRNSDLLDLTINKPDLSIYDIGGEK

SEQ ID NO: 167 - protein, 516 aa, synthetic construct
MERIHMNHVRELIYRLRAGESQRRIAKDLGMSRTTVSKYQAWAKAQGYLDPGCPMPDDTALAAALGETPKPPCAESSVEPYRELVQAWLDQGVEMTAIWQHLQDDYHYPGSYSSVRRFVKRLRPHEPEVFVRVHTAPGEELQVDFGGVGQLYDPSSGRLRRGYVFVATLCYSRHQYAEFVFDQKVPTWIGLHRRAFESWGGVPQRVVVDNLKAAVVKVLVHDPILGEAYRRMAQHYGFLISPTRPYTARHKGKVENGVHYVQRNFMAGRQFLDIHAANQHLQAWVAERAGTREHGTTHQAPLYLFNAYERAALLPLPTAPFTLREVKPVTVHPDCHVSIDKSYYSVPYRYVGQTLDAYVGERVVEVYRGLELIATHERSLQPGEWHTRLEHYPEHKAAYLERTPTYCRQVAARVGEATQQVVETLLGDRPLYRLRSVQAILRLEQTVGAERLEAASARALHFGDPSYRRIKAILNAALDREPLPEPAPAIFVRPHVFARSGTEFFDGEESEEADKC

SEQ ID NO: 168 - protein, 487 aa, synthetic construct
MQFRKFDPAAVAAAKAGFSPATAYRLAKDPRLPSQKKPRARRRPDPLETVWDSEVVPMLKAAPGLRPIGVFEELRRRHPELGSGVRRTLERRIRNWRAIHGPEQEVIFRQDHPPGRMGLSDFCDMRNLNVSVAGVPLDHRLYHFRLPFSGFESAHVVLGGESFIALAEGLQNALWTLGGAPQQHRSDSLSAAFRNLDADAKEDMTRRYEALCAHYGMTPTRNNKGVSHENGSIESAHGHIKAALEDELLLRGSRDFDDLGAWRKFVDELVGRRNARNAARIDLERAELKELPPRKTSDFEEERVSVTSSSAFTLRKVFYTVPSRLIGHKLLVRLHDDRLEVFQGSTHLCDLPRGRPGRNGKHGHVIDYRHVIHSLRRKPMALLNLVYRDQLFPRRAYARAFDMLLAESGEKAACKTMVGLLALAHERACEAELAIAIEEELDAGRPPNLSTLTERFAPKTAAAPNVIVALPELAVYDALASLEGAAA

SEQ ID NO: 169 - protein, 507 aa, synthetic construct
MSENGVSNRQIARDLDINKETVNNYVRFFGNDPLSLKEVLNIEDPELEARFRAGNPAYTDYRHQTFLDELPEFKTSLSHKHVTRFLVWQDYIARHPDGYRKSQFFHHLKQQLAASTPTTVLSDTYVPGEKLYVDFAGDTLEYVNTETGEITKVQVFVACLPYTDYAFALCIPSQRVEDFLYAISRCMEAMGGVPKILVTDNLKSAVIKADKYEPTLNKALEDMGNHYRFVTIPCRPYSPTHKALVENQVKIIYRRVYAKLRNTTFYSLEELNEAVSQKMLEHNQTRMQQRPYSREEQFFAVEKNTLSPLPEQPYEMKFTCDLQVRNDGFVYLARDKHYYSVPFVHIGKRSHLIYTRTLVKIFVNNELVATHERHPGFGHTHKKEHLASNSNAILSRSPEYYQEKAERHSAVFKQLVSDMFLDLEQRQIPPEFKYKTCDYMLSIGRKTPIADFEQACRIAIQNRSYSGKFLQNVISNLHVAKSQNESEKRINPQPTNHENMRGNSYYK

SEQ ID NO: 170 - protein, 466 aa, synthetic construct
MKYSYHSTALQEGPTPQQITSWSQTLRQWQRRLAPLFARPEVLDHALLYLQAILSDIPRKNGWQIAEHARQARPYGMQRLLSRAVWDQDGVRDALRRFVCHTLWPPAVGCAPAEPESLFPVLIIDESGFPKRGKHSAGVGRQYCGISGRVENCQVGVFLSYVTKLGHALIDRELYLPEDWCVDAARRQAAHIPESVLFQTKPELAQHMLARALSAGVPCRWVVADSVYGHSPELRTFLEAQGSPYALAVPSIEVICVQTRDGPLLSDVGSIAHQVHAGDWQRLSMSLGTKGDRLFDWALLPWMQGGAVDGRHWLLIRRCLDDPHELAYYLVWAPLQTPLSTMVQAVGARWRIEEDLQASKDLGLDQYEVRSYLGWYRHSTLVLLAYAFLVGICVQDRSQHGPPEESIPSSPLIVLTPSEVQHLLARLIWPLPASVPLVCAWSHFRRIHQYWAGYSHRRRRTKAASP

SEQ ID NO: 171 - protein, 495 aa, synthetic construct
MIDYELFCRIKQRQAEGLKAAQIAAALGLDERTTRKWMAVAQYHPRRSVRRASKLDAFRDRIRAWLEQHPFTAVQIFQKLRQEGYHGGVTIVKDYVRRVRPPRRPAFLSLSFAPGECAQVDWGQYGTIAVGSTRRRLSFFVLTLGFSRLLYVAFTLAEKMEHWLDCHVRAFEFLGAVPRRLMIDNLRSAVLSHPPGGPARFHPRYLELAAHFGFQPVACPLGQAHHKGRVERSVGYIKHNLLDGLPIVGRPSLELEARRWLDEVANQRLHRDTRRKPIELFTSEEKPALLPLPLTSFDTSVTLPVRATRQFRVEYDGNRYSVPSEYAGQLLTGKAYADRLLFYHQHNLIAEHTRSYDRGQDQSNPDHERALLVERRRARSQQIYRRFLLLTPKADAFYAQLRERRLNPLVHLRKIVALADVYGTAPVAQAIEDALHFQAFSSEYILNILQQRGRQSSPPGPLHLPHKQELLDLDLPEPDCSLYESNSPSDPQDPS

SEQ ID NO: 172 - protein, 502 aa, synthetic construct
LPGRHVTDRQMRLFMQFRKSDPATVAAAKAGFSPATAYRLEKDPRLPSQKKAPRSRRRPDPLEGVWDKEVLPMLKAAPGLRPIGVFEELRRRHPDLTPGVRRTLERRIRSWRALHGPEQEVIFRQEHPPGRMGLSDFCDMRDLGVCIAGVPLEHRLYHFRLPFSGFESAHVVLGGESFVALAEGLQNALWALGGAPQQHRSDSLSAAFRNLDADAREDATIRYEALCAHYGMTPTRNNPGVSHENGSIESAHGHIKAALEDDLLLRGSRDFDDLPAWRKFVDELVSRRNARNAARIDLERADLKELPPRKTSDFEEERVRVTSSSAFTVRKVFYTVPSRLVGHKLLVRLYDDRLEVFQGSTHLFDLPRGRPRPNGKHGHVVDYRHVIHSLRRKPMALLNLVYRDQLFPRRAYARAFDALLAEAGEKAACKTMVGLLALAHERVCEAELAATIEEELDAGRLPDLVSLTGRFAPKTAAAPNVVVALPDLTVYDALASLEGAAA

SEQ ID NO: 173 - protein, 496 aa, synthetic construct
MNRWHRCVKQLHQRLRSHVARPEPSQHAVLSLQAVLREIPRNHGWQIAEHARLPHPSGIQRLLSRASWDQDGVRDVLRSFLCQTLTSPSPSSGGSDPPTPFPVGVVDERGFPTRGHSSAGVGPQECGRTGPMEHGPMGVFLSSVTEQGHALIDRALSLPEDWCSDLPRRQAAHLPDTVRFQTTLELATRLIQRAQSARVPMRWVVADTVDGHRSDLRQWLHEQGSASAVAVPRTDVIPVHRPAGPSLCAVNGIASSLHRRREWQRLRQSLGTTGERLGAWALLPWLQAGLEDGRHVLVIRRSLDDPEHVTSSLVFAPPSTPVSTIVQASGARWRIEDDLEATNDLGLDQYDVRSFPGWSRHLTLVMLASAFLVGVTVQEPLLDSSQDSPAARSPMIPLTPSDIRPLLARLLFFAPASAPRVCPWSHVRRAHQSWAGSSHRRRREKAGDATGGSLSGASVPRIVVLRCLECSWECSWEFSSCSVGSGFLLFGKGALS

SEQ ID NO: 174 - protein, 514 aa, synthetic construct
MERIHMNLYKEIIHRLRSGESERSISRDLVISRPTVHKYKLKAEAEGYLDEGRGLPGNEEIAESLGPAPRPPRAPSTVEDYRGVVEKYIEQGLEMTAILQRLREDHGYRGSYSSVRRFVHHLRPGEKEVYVRVHCEPGEEMQVDFGSIGQIYDSKAGKMRNAYVFVATLSYSRHQYAEIVFDQKAGTWIGLHQRALDFFGGVPRRVVLDNLKAAVVKALVLDPILGEAYRKLAQHYHFLISPNRPHTPRHKGKVENGVNYVKRNFFAGQVFVDSETANLRLKAWVIDTAGVRDHGTTHLAPMKAFRDVEQAALQSLPAEPFDLCDLRMAKVHSDCHIVVEGSFYSVPYHWVGSEVEVHIHERVIEIYAGQELIRTHTRAARKGQWRTEMEDYPSTKVQYLLKTPRYCLQTARGIGPNTSQVVEQLLADRPLDRLRSVQAILALADSVGESRLEAACARALYYGDPHYRRIKDILNAALDREPLPGPVTSPTLQLTFTFSRAPQEFFPSGQEIPR

SEQ ID NO: 175 - protein, 490 aa, synthetic construct
MIDFDLFVRIKNYHEQKGLNAAQIARELELDPRTVAYWLSQKKYRPRNPVQRPSRLDPFKSSILRMLENHPYTAAQILHKIREEGFDGGYTILTDYVRKVRPRRTPAFLKLSFAPGECAQVDWGSHGSIQVGETRRRLSFFVMVLCYSRMMHLEFTVSQTMEHFLACHQNAFAAFGSVPKRIMVDNLKSAVLKRIVGAAPVFNPKYLDFANHFGFTIAPCGVGKGNEKGRVENGVGYVKKNLLAGLDPPDFHAMAPAAKQWLDTVANVRIHGETRRKPIEMFDEEKASLLPLPPHPYDIGVISAVRASTQFRVSADSNHYSVPAEYAGASLTLKTYPDRICIYHADKLIARHARSYERNKDVEDPDHPKELIAQRKKARDQKIFMRFVSLCPKASDYYRELEKRRMNPRHHVQKIVALSEIYGPDSVARAMEDAFFFQAFSCEYIANLCEQRTRRLPEPGALHLTRRADLLDLEVQRPDLSIYQKESRKD

SEQ ID NO: 176 - protein, 528 aa, synthetic construct
MAGTIKDMSLIKQVIQLKQLGESNRGVSRKLSINKGTVNAYVNIIQCNGLSYDDLLSKDDPELDRLFHAGSPAYSDPRMADFLAKLPYFKEQLGNPKLHVTRQLLYEEYKAGYPHGYGKSQFYFHLQQNLIAQKDCTAVLTETYNPGEKLMVDFAGDKLSYVDIETGEIIKVEVFVACMPYSDYTYVICVPSQKTEDFLFAIRMCMEYLGGVPPILTPDNLKSAVITNDRHEPKLNKALEDMGNHYHFVVLPCDPKEPTQKALVEDKVQTTYNRIYAKLRGRTFYSIVELNRAVWDLLSLFNKTRMQKRPYSREERFHAAEKDKLKQLPQNIYEMKYYANLQVQTNCFVELRQDKVTHFYSVPYIYVGKKALVIFTRSVVNIYIDGTQVATHMRSYEYGHTYIKEHLASNCRAIMERSASYYITWASHISPECRNYISEVFNPQRTSQPEEVYYKLCASIMSLSRKYEVAIIDKTCRQCRECKVFSYRKFEAILKHNSLIASEDEPTRCFEAPVPTDHANMRGSNYFK

SEQ ID NO: 177 - protein, 489 aa, synthetic construct
MIDFDLFVRIKNYHEQKGLNAAQIARELELDPRTVAYWLSQKKYRPRNPVQRPSRLDPFKSSILRMLENHPYTAAQILHKIREEGFDGGYTILTDYVRKVRPRRTPAFLKLSFAPGECAQVDWGSHGSIQVGETRRRLSFFVMVLCYSRMMHLEFTVSQTMEHFLACHQNAFAAFGSVPKRIMVDNLKSAVLKRIVGAAPVFNPKYLDFANHFGFTIAPCGVGKGNEKGRVENGVGYVKKNLLAGLDPPDFHAMAPAAKQWLDTVANVRIHGETRRKPIDMFQEERASLLPLPPYPYDLGAIAQVRASTQFRVSLDANHYSVPAEYAGSHLTLKTYPDRICIYHGEKLIARHTRSYDRNKDFEDPDHPKELIAQRKKARDQKLFMRFLTLCPKAQDYYLELEKRRMNPRHHVQKIVALSEIYGVGPVARAMEDAFFFHAFSCEYIANLCEQRARRLPEPGALHLTRRSDLLDLEVQQPDLSIYQEDKRD

SEQ ID NO: 178 - protein, 533 aa, synthetic construct
MVGKCGWIYTGSSRVMLTTEQINSIHRLHWSEHWSVRKIARHLHLGRRTISQYLATPARSAARRQRASKLDPFKATIAELLQQDANASAMVIAQRLRPLGYTGGLSILKDYLHGVRAQTATQRAYVRMEPGPGERFEIDWGHFGALFYQGHARKLYAFCLVECHSRKLFVEFTHSQSFETFVRCHIHAFQSMTGVARELWYDNLATAVAEHDGNLVRFHPRFLAFAREYSFLPRACHVRAAWEKGKIERAVQYLRQNFWPLRTFRDLLDVNLQARHWLEQVANQRRHRETGETPAARFQPETLRALPVIVPDYRDTAEALVHKDLRLSFDGNRYCVPPRFVGRHLTVKADASAVTLYDQYQEIVSYARCWQRGQTLGAERFQKELLAQFAAAQRSAEQQRLVSLLGPASESYLRRLADTDRSLTRQVRELLLLVREYGPQAVATAMTQAHAAGAFGADYIANLLRQQRMRRDVQPPLRFQNPQLNELATDPLSLADYDSFILRSKKDSDDLTATETPATESGDDEPSSGSDPD

SEQ ID NO: 179 - protein, 483 aa, synthetic construct
MINFETFCKIRHLRDHDRLHKSQIAKALSLDLRTVEKWLAVKQFQPRKSTERSSKLDAFKPIIVQMLETHPYSGKQIFQRIKEEGFTGGYTIVTDYIRKVRPRKTTAYLKLAFAPGECAQVDWGSFGSIAIGETRRRLSFFVMVMCYSRKMYLEFTVSQTMEHWLSCHQNALRFFGGVPRKIMIDNLKSAVIKRAVGEAPVFNKRYLDFADHYGFNIVPCGVAKGNEKGRVESGVGYVKKNFLAGLPMPSFAALQRAGREWLDSIANQRIHGETRKKPQDLFAEERLNSLSIEEYDCATIEQMRASSQFRISLDSNRYSVPAEYAGCKLAVKIYPDRLCIYEKEKLVARHQRSYDRHQDFEDPDHPKELLAQRKKARDQVIIKRFLAISSKAQSYYQKLEERRMNPLAHIRKIVALSEVYGSEAVSRAIDDAFEFAAFSCEYIANILEQRSRVQNEPAALHLTRKKDMLNLNVDEANFEIYTV

SEQ ID NO: 180 - protein, 492 aa, synthetic construct
MIDYPTFLQIKHLQQDQHLKCSQIATELTLDERTVAKWLDENQYRQRKPVQRNSKLDPFKGDVARMLETHPYTAAQLLQRIREDGFDGGYTIVKEYVRKIRPKPKKAYLVLSFAPGQCAQVDWGSYGSVRVGDTTRRLSFFVMVLCYSRMMYVEFTVSQTMEHFLSCHQNAFSYFGAVAERMMVDNLKSAVLKRTLGNDPVLNPKYLDFANHYGFTIAPCGVGKGNEKGRVESGVGYVKKNFLSGLQIGDFKDLKPAALHWLGTVANVRTHGETGRKPVEMLQEERPQLHRLPAHPYDIATICPVRASRQFRVVLDTNRYSVPAELAGQPLTMKAYPDRVCLYHQEKLVARHVRSYDRRKDFELPDHPKVLMAQRKKARDQIIFRNFLALHPKSDDYYRQLEQRRMNPLHHIRQIVALSDIYGKDQVKRAIEDAFTFRAFSCEYIANLLEQRNRKSTEPGPLHLTRRQDLLELDLDEPNIDIYNHFAPGESE

SEQ ID NO: 181 - protein, 440 aa, synthetic construct
VLRLRQEGVEIAAIYARLGEQGFQGSYQAVYRFVKALEPGKPEVMVRMETPPGAEAQVDFGYAGKFIDPHTGTPRKAWVFVMTLSWSRHQYAELVWDQSLATWIQCHRHALEFFEGVPQRLVIDNLKAAIIRACFDDPQVQVTYRECAEHYGFLIAPCRPRTPQHKGKVEQGGVHYVKRNFLAGRDPQPLSEANVALRQWCLNTAGLRTHGTTRAVPMTRFVSTERQALQPLPATPYDLSVWKIAKVARDGHITFDNAYYSVPCAQVGCQVQVRGSSTTVRIYDQDYHLLTTHTRATEPGDRVTKMEHLPPEKVAGALLDRPTCQATAAEIGPATAQVVQQLLDDPAIERLRPVISLLRLRETYGDARLEAACTRALHFNEYRYGMIKRILQQGQEHAPLPAPVNPSAPPPRTFVRSAAELLGHLFGGEVWNCDTNSSPN

SEQ ID NO: 182 - protein, 493 aa, synthetic construct
MKSRQIVFDIHRLKEEGYSNRAIARTLGIGRNTVDRYLKSPDASLTPKRTLPSKLDLFKAQINQFLEEDPNVNAVVILRRIKEMGYEGQLTILREYLRKQRGQSKQRKAFIRFESGPGDQLQIDWGHFGSIPYGDTNRKVYALVAVEAYSRMMYVKFTHSQNQQTLHGCLLNAFKYFGGTPKTIVVDNMMTAVVERESRLIRFNDAFLDFLRPFHIRPKACTPGSPQEKGKVERAIRFLRQNFIPLNTFKDLKDYQSKVMEWLDRFANLRVHQTTGEIPKQRFITVPLRPLPDLLPDTRESYSLTVHKDFAVKVDTNSYTTPPWTIGKKLTLKADQYTIWIYHKDKLIISYPRCWERKKRIETEAHVEQVKKLQRKHWESKEIKAFASLGEEFREYLTQLPASNQPLKRQVVLLLSLKDQYGVKSLSWAIMKALKHGAYGADYIENILYQEMIPINQHAPVKLKNEALNRIRLTEPTLSDYDAIALKRRKYRD

SEQ ID NO: 183 - protein, 492 aa, synthetic construct
MDPAILEAIYRLHQGEHWSIRKIAAHLGVSRDTVRKYRNGPVARAAMAPRASKLDPFKPILRDLLEQDARAPGSVLLQHLRRLGYQGGVSILRDYLTRVRPRRPARAFLRMDPQPGERFEVDWGHFGVLDYEGDRRKLYAFALVDCHSRLLYVEFTHSQGFETFVRCHIHAFRAFGGVSREIWYDNLLTAVAERDGRLVRFQPRFLAFARDYGFYPRACNPAAGWEKGTVERAGIRYLRQSFWPLRTFRDLVDVNRQVRRWLEEVAHQRRHRETRQTPGERFQPEALRPLPPLDPDYRDTAQVRVYKDLRVHFDGNRYCTPPRCVGRRLTVKADAQSVTLYDGRREVTSYPRSWRRGQVIGADRFRDELVESRPAARTSQAQARLVALLGPSVETYLRALAETDRSLSRQITELLELVRLYGPDPVRAAVDRAQVAGAYGADYIANLLSQEQHLRRPEPPLRLKDPRLNELVTDPLSLLACDALIFEEGDDE

SEQ ID NO: 184 - protein, 489 aa, synthetic construct
MIDYETYVRIRNLFTREGLKYSQIADETGLDCRTAAKWANEKRYRPRRTSQRASKLDPFKNEIVQMLEKHPYSAIQIFQHLRANGFDGGITIVSDYVRKIRPPKTTPYLKLIFAPGECAQVDWGTYGNVCVGSTSRRLSFFIMVMSHSRMMYVEFTVSQTMEHFLGCHQNALHFFKAVPEKIMVDNLKSAVLKRTVGKAPVFNPRYMDFAQYYGFKIVPCNVGKGNEKGIVENAVGYVKKNLLNGLNISDFKIMKPVTRNWLDTVANVRTHKETGKRPVDMFTRERQSLQPLPMEPYDIGVVQQVRASKQFRVTIDTNRYSVPAQLAGVGLTAKLYPDRLCFYHENKLVARHVRRYDRHQDYEDPDHPKVLLEQRKKARDQKIFMRFLNLSDKAREYYQQLEHRRMNPFHHIRQIVAFSEIYPEDQVSRAIEDACHFKAFSGDYVANILEQRSRHTQEPGALHLTRNSDLLDLTIKKPDLSIYNIGGKK

SEQ ID NO: 185 - protein, 532 aa, synthetic construct
MIDYELFCKIKDYHQNKHLSISQIASELGLHRETVAKWLAREKYCQRKPAPRSSKLDALKSTIVRWLESHPYSATQIYLRLRDELGYKGGITIVKDYVHTVRPPRAKAFLTLAFAPGECAQVDWGQFGTIAVGNTTRRLSFFVMVLCYSRQLYVEFTVSETMEHFLACHQHAFEFFGGCVPAKIMVDNLKSAVLRRVMGTTPVFNPRYKDFADHYGFTIVPCGVRQPNEKGRVENAVGYVKKNFLAGLQLTDFRAVNPAARVWLDTIANLRLHGTTKQQPAELFLKEKPSLKPLSLLPYDIGMVHTVRATSRFRVTLDSNTYSIPAEFASARLTLKVYPDHLCVYHQDKLIARHVRSYDRHQDFENPDHPKELLQQRRKANEQKVLLRMLTMTPKAETFYQELQQRRFNVNHHVRKIVALSEIYGVDKTARAINDAVEFQAFSCEYIANLLEQRQRLLPEPAALHLTRREDLLDLELPEPNLNLYDIAALDNVPVHVPVITPVDAPATGAGNNLPMPEGTKHEPEQGNSEDR

SEQ ID NO: 186 - protein, 489 aa, synthetic construct
MLDYETYCKMRDHLGRQSLTVAQTARALGLDTRTVAKWAEVEQFQPRACNTPRVSKLDAFKGQIVRWLDAHPYSAQQIYQRLCAAGFDGGITIVKDYVQRIRPRPAQAFLKLEFAPGEAAQVDWGEYGTITVGSTKRRLSFFVMVLCYSRRMYLEFTVSQTSEFFLACHERAFAAFGGVPQRLIIDNLKSAVLQRIAGVAPVFNARYLDFSRHWGFEMSACNVRSGNEKERVENGVGYVKKNFLAGLELADFSALQAAGTLWVDTVANVRVHASTHQRPIEMFAQESGALKPLNPNGFDLARILTVRANKQFRVALDANHYSVPARCAGRSLLLKASDDRVCVYADNQLIARHVRSMDRHQDIEDPQHPQALLAQRRSGREQRLLTQFLAISPRAQAYREGLEAKRVDARAHLRKIVALLEMHGRDAVARALDDGLELQAFSAEYIAHILAARRRIGEEPGALQLTRGSDLLDLELPAPDLSIYDRDVM

SEQ ID NO: 187 - protein, 488 aa, synthetic construct
MIDYELFAKIRHLKEHEGLTAPQIAAELSLDSRTVRKWCAATFRPRKITPRSSKLDAFKRDIVCMLETHPYTATQIFQRISEDGFDGGYSIVKRYVRRVRPPKSPAFLKLSFAPGECAQVDWGSYGAVNVGSTQRRLSFFVMVLCYSRMMYVEFTVSQSMEHFLGCHQNAFDFFGLVPKKIMVDNLKSAVLRRIVGQAPVFNRKYLDFANYYGFSIAPCNVGKGNEKGRVENAVGYVKKNFLSGLNIPDFSAITPAAKNWLNTIANVRIHGETRQKPLDLFEKERPFLNPLPANPFDVATVSQVRASSQFRVTLDTNRYSVPAEYAGTRLTLKAYPDRLCVYSKDKLIARHVRSHDRYQDFEDPDHPKELLNQRKKAWEQKIFMRFLALSPKAEQYYHKLEQRRMNPHHHVRKIVALSEIYGPDAVARAMEDAFSFEAFSSDYITNLLEQRSRSLPEPGALHLTRREDLLKIKVDQPDLSIYERKHHD

SEQ ID NO: 188 - protein, 467 aa, synthetic construct
MKSPQHTTPEPADPSLRTIGAWALALRQLHQRLAPHFARPEVRRHALLYLQAIMSEIPRKNGWQIAEYAKEARPYGMQRLLSRAVWDEAGVRDDLRALVCQTLLPPPLLPAAASHESLFPVLVMDESGFPKRGKHSAGVGPQYCGLTGRVENCQVGVFLSYVTARGHALIDRELYLPEDWCSDLPRRQAAHIPQTIPFQTKPELAQRMVERAQAAHLPIRWVVADTVYGHSPDLRSWLEEQGYAYALAVPSIEVICVQTKADGMLLSDVASIVQQALRARDWQRLSQSQGTKGERRFDWARLPVIQGGTVDGRHWLVVRRCLDDPHEFAYYLIWAPPDTPLPTMVQAIGSRWHIEEDLQTCKDLGLDHYEVRSYLGWYRHLTLVLLVSAFLVGITVQSHLTASARPAEPAACATLIPLTTSEARHLLAHLIFPAPTSAPLIFHWSWWRRTHQYWAGYYHRRRREKVG

SEQ ID NO: 189 - protein, 467 aa, synthetic construct
MKSPQHTTPEPADPSLRTIGAWALALRQLHQRLAPHFARPEVRRHALLYLQAIMSEIPRKNGWQIAEYAKEARPYGMQRLLSRAVWDEAGVRDDLRALVCQTLHPPPLLPAAASHESLFPVLVMDESGFPKRGKHSAGVGPQYCGLTGRVENCQVGVFLSYVTARGHALIDRELYLPEDWCSDLPRRQAAHIPQTIPFQTKPELAQRMVERAQAAHLPIRWVVADTVYGHSPDLRSWLEEQGYAYALAVPSIEVICVQTKADGMLLSDVASIVQQALRARDWQRLSQSQGTKGERRFDWARLPVIQGGTVDGRHWLVVRRCLDDPHEFAYYLIWAPPDTPLPTMVQAIGSRWHIEEDLQTCKDLGLDHYEVRSYLGWYRHLTLVLLVSAFLVGITVQSHLTASARPAEPAACATLIPLTTSEARHLLAHLIFPAPTSAPLIFHWSWWRRTHQYWAGYYHRRRREKVG

SEQ ID NO: 190 - protein, 465 aa, synthetic construct
MKHPQHITLAQADPTPGQISTWTVRLHQLHARLRPFFARPEVHQHALRYLQAVLSDVPRKNGWQIAEQAREARPYGMQRLLSQAIWDQDAVRDELRALVSQSLRAPVAPQEETDTAPFPVLVLDESGFPKRGRHSAGVGPQYCGRTGRVENCQVGVFLSYVTAQGHALIDRDLYLPEDWCADPPRRQAAHIPEAVRFQTKPDLGQQMIGRAQEAFLPIRWVVADTVYGHSPDLRAFLEEHGFSYALAVPSIEVVCVQTRAGLLLADVASIAQQALRARDWQPLSQSQGTKGERLFDWTRLPLVQAGTTDGRHWLVVRRCLDEPHELAYFLVWAPADTPLPTMVQAIGARWHIEEDLQAGKALGLDHSEVRSYVGWYRHITLVLLAAAFLLGITVQSHLTESAPPAEPAAGAPLIPLTPSEARHLLAHLFWPAPTCAPLICQWSIFRRAHQYWAGYYHRRRRAKAS

SEQ ID NO: 191 - protein, 495 aa, synthetic construct
VIDYPTYCRIHHLHQHEKLNVAQIARALSLDARTVATWLAETHYRARHSSTCRPSKLDPFKRTVRGLLENHPYSAVQILQRLREAGYDGGLSILKDYLRTVRPHRAPAFLTLAFAAGECAQVDWGQWGSVPVGNTRRKLSLFVMVLCHSRLMYLEFTVSQSMEHFLACHAHAFEFFGRRVPKKIMVDNLKSAVLRRFVGEAPVFNPRYLDFAHHHGFQIVACGVGQPHEKGRVESGVGYVKKNLLAGLDIPDFHALTPEARLWLDSVANVRIHGETRQRPVDLFETEQALLLPMPEHPYDIGTVRPVRASNRFRVIFETNRYSVPAEYASRRLMLKTYPDRLCVYHADKLIARHPRSYDRFRDFEDPDHPRELLEQRRSARHHKLLQRFLALSSNAHTYYRHLELRRLNPRHHVHKIIALSEIYGTEATARAIDDACAFEAFSSEYIANLLEARARTLPEPSPLHLTRSADLLELELPEPDLGLYDPPDDDRPSP

SEQ ID NO: 192 - protein, 489 aa, synthetic construct
MIDYETFMKIKSYHEKDGLNCNQIAAIMGLSFKTVDKWLNEKRYRMRKSADISSKLDPFKKQILQMLEKHPYTAAQILLRIKDNGFDGGYTIVKDYVRKVRPPKTRAFLKLSFAPGECAQVDWASYGSVNVGSTCRRLSFFVMVLCYSRMMYVEFTVSQTMEHFLACHQNAFDFFGSVPKKIMVDNLKSAVLSRIVGQAPVFNPKYLDFADHCGFAIAPCNIGKGNEKGQVENAVGYVKKNFLAGLDIPNFAAVNPAARHWIDTVANVRIHGETRKKPIELFKEERPCLLALPENPFDIATVSQVRASSQFRITIDTNRYSVLAEYAGRRLTLKTYPDRLCVYCNDKLVARHVRSYDRYRDFEDPDHPKELLARRKKARDQKIFMRFLTLSAKAEQYYCKLEQRRMNPYHHVRKIVALSEIYPPESVARAMEDAFAFEAFSCEYIANLLEQRSRCLPEAGALHLTRREDLLDIKIEQPDLTIYERKNHD

SEQ ID NO: 193 - protein, 489 aa, synthetic construct
MIDFDLFVRIKNYHEQKGLNAAQIARELELDPRTVAYWLSQKKYRPRNPVQRPSRLDPFKSSILRMLENHPYTAAQILHKIREEGFDGGYTILTDYVRKVRPRRTPAFLKLSFAPGECAQVDWGSHGSIQVGETRRRLSFFVMVLCYSRMMYLEFTVSQTMEHFLACHQNAFAAFGSVPKRIMVDNLKSAVLKRIVGAAPVFNPKYLDFANHFGFTIAPCGVGKGNEKGRVENGVGYVKKNLLAGLDLPDFHAMAPAARQWLDTVANVRIHGETRRKPIDMFQEERASLLPLPPYPYDLGAIAQVRASTQFRVSLDANHYSVPAEYAGSHLTLKTYPDRICIYHGEKLIARHTRSYDRNKDFEDPDHPKELIAQRKKARDQKLFMRFLTLCPKAQDYYLELEKRRMNPRHHVQKIVALSEIYGVGPVARAMEDAFFFQAFSCEYIANLCEQRARRLPEPGALHLTRRSDLLDLEVQQPDLSIYQEDKRD

SEQ ID NO: 194 - protein, 489 aa, synthetic construct
MIDYETFMKIKSYHEKDGLNCNQIAAIMGLSFKTVNKWLNEKRYRMRKSADISSKLDPFKNQIVQMLEKYPYSAAQILLRIKDNGFDGGYTIVKDYVRKIRPPRTRAFLKLSFAPGECAQVDWASYGSVNVGSTCRRLSFFVMVLCYSRMMYVEFTVSQTMEHFLACHQNAFNFFGSVPKKIMVDNLKSAVLSRIVGQAPVFNPKYLDFADHCGFTIAPCNVGKGNEKGRVENAVGYVKKNFLAGLDIPDFTAVNPAARHWLDNVANVRIHGETRKKPLELFKEERPCLNALPENPFDIATVSQARASSQFRITIDTNRYSVPAEYAGRRLTLKTYPDRLCIYCNDKLIARHVRSYDRHQDFEDPDHPKELLARRKKARDQKIFMRFLTLSPKAEQYYCKLEQRRMNPYHHVRKIVALSEIYPPESVARAMEDAFAFEAFSCEYIANLLEQRSRCLPEAGALHLTRREDLLDIKIEQPDLTIYESKDHD

SEQ ID NO: 195 - protein, 514 aa, synthetic construct
MERMHMNHIRDIIHRLQQGQSERQICRDTHISRPTIRKYRLWAKAQGYLLPGRPLPEHTTLAEALGPATPPPRPRSSLEPYREKIEKWHAAGVEMMAMWQRLQEDYLYSGSYSSVRRFCKQFRNTTPTAVVRVHRAPGEELQVDFGYIGQIYDPHSGRMRKAYVFVATLSHSRHQYAEIVFEQKIATWLALHRRAFEYFGGVPRRVVPDNLKAAVSKALIIDPILAEAYRRFALHYNFLISPTRPRTPQHKGKVENGVHYVKRNFIAGRTFVDVDAANARLKIWVKETAGARIHGTTRQAPWKLFHDIEQSELQPLPEKPFHLLAIKPVKVHRDCHITLERNYYSVPHRYIGQRLDAHIHEKMVHLYDGVDLVVSHIRNLGEGQWTTRLNDYPPEKAAYLKQTPPNCRESAQSIGPATEKVINTLLDTRPLDRLRAAQNILRFEEKVGKERLENACARALHFNDIQYQRVKQILKAGLDHEPLPGETPATEPSERFEFARSAQEFFASIEVQEC

SEQ ID NO: 196 - protein, 511 aa, synthetic construct
MDIRELLLQLRQTTSDRAVQRATGVHRQTVKRYRSWATAQGLLTGPLPPLLELEQRLRQTLPEPPPPQNTSSVEPYRALVSQLHKEGVEMTAILQRLKERGYSGSYSAVRRFVGGLTTAQPEIFVRVECKPGEEAQVDFGFAGLLCDPATGQLRRAWAFVMTLAWSRHQYVEFVFDQKLATWLLCHRHAYEWLGGVPARVVVDNLKAAIVKACFDDPLVQQAYRECAEHYGFLIAPCRPATPRHKGKVEQGGVHYVKRNFLAGREPTALNQANQAVLTWCTTTAGLRIHGTTREQPLTRFQQTEQARLKPLPAAPYDLAVWKEVTVGADGHITFDNAYYSVPCRFRRGTRLRVRGGAQFVTLYTLAHEPVFTHDRAQQAGARATHPDHLPPEKVAGLTVSREGCQAAASAIGPATSAVVTTLLNDPAVDRLRTAGRLLRLRERYGAASLEAACARAVQFAEPVYATVKRILVEGLATPVPTPPPAPTPPAQTFARSAAELLGHLFGGAAWN

SEQ ID NO: 197 - protein, 462 aa, synthetic construct
MKPPQHTTLPQVGPSLREISAWYQRLAELHARLRPHFARPEVYQHALRYLQAVLSDIPRKNGWQIAEQAREARPYGMQRLLSQAVWDQDAVRDELRALVRQSLLPSDAEPADQAPFPVVVLDESGFPKRGRHSAGVGPQYCGRTGRVENCQVGVLLSYVTARGHALLDRELYLPEDWCAAPARRLAAHIPESVTFRTKPELGQVMLERAQTAELPINWVVADSVYGHSPDLRAFLEEQSLPYALAVPSIEVVCVQTRAGLLLSDVATIAQQALRARDWQRLSQSQGTKGERLFDWARLPLVQAGVADGRHWLVVRRCLDDPHELAYYLVWAPPETPLPNIVQAIGARWRIEEDLEASKALGLDHYEVRSYLGWYRHLTLVLLAYAFLVSSTVQSHLTAAATEAAAASRALIPLSTSEARHLLAHLFWPAPTSAPLICHWSWWRRTHQYWAGYYHRRRRAKAG

SEQ ID NO: 198 - protein, 503 aa, synthetic construct
MIDYATWCAIRDGVAQKLTPTQLAESLELDIKTVRRWIGRPYTPRQGNARPSLLDPFKGRIARWLELHPLSAQQVFQRLNEAGFKGGISIVKDYVREIRPKPREAFLTLAFAPGEAAQVDWGEFSSIAVGGTRRRLSFFVMVLAYSRKMYVEFTLTQTMEQFLQAHINGFNALGVPKKVIVDNLRSAVLKRTRGEPPVFNPRYLDFARHYGFEIVACNVAKGNEKGRVERGVGYVKANFLRGLDLPDFAGLNPALQVWLESVANVRLHRETRRRPIDLWQEERAHLQAVNPRPFDVGRVLAVRVNKQFRVSFEANRYSVPARFAGTQVVLKAYPDRLCFYQGETLIARHARSFERHRDIEDADHPKALVAQRRHARDAHVLQRFLALPNAPAYHAGLLARRGNAMAHVHKIMALLEIHGEEPVLRAMQDALAFEAFSSEYIAHLIAARARQLPEASPLVLMRRQDALELELPPADLSAYPDPALGLDEDFDHDVIEGDSHGDD

SEQ ID NO: 199 - protein, 510 aa, synthetic construct
MDVYEILRLVKLGKSNRTIASTLDIDRKTVGKYRSWAEEQGLLTGELPSREELYRLLEQSWPNQQPPQNTSTVAPYHDVVVALRDQGVETAALHQRLVDDHHYSGSYSSVWRFVNHLEPKRPAVVVRVEVKPGEESQVDFGYAGQMIDPETDQLRRAWVFVMTLSWSRHQYVEFVFDQKVETWLLLHRHAFDFFGGVPERVVIDNLKAAIVKACWDDPQVQRAYRECAEHYGFLIAPCRPGTPEHKGKVEQGGVHYVKRNFLAGRKPMLITDANQAGLKWVEQVAGQRRHGTTKQKPLERFREVEAAALRPLPATPYEPATWKQVKLHRDCYVVFEQAYYSAPYQLVGQTLWVRGGARIVELYTQDYQRVATHDRARQPGDRQTNLHHLPPEKLPGLMLTRPVCREQAAAIGPATAEVVEGLLNHCPEDRLRTAGRLLGLAQRFTPERLEAACRRALHFDDPAYVTIKRILEQELDVEPLPQPSPSVPAWTFVRSAQDFARALLGGVSWT

SEQ ID NO: 200 - protein, 492 aa, synthetic construct
MIEQRIIFEIHRLANEGFSIRRIAKQLGLHRVTVGRYLENPTPKRPPCTRPSKLDPFKDEIERLLEIDPHAPATVIHQRLAAKGFTGKFSILRVYLRKVRKRKVRAFVRFESAPGEQCQVDWGHFGSLDYGDTKRKLYCLAVVESYSRMLYLEFTHSQRQEALHRGLLNAFAFFGGTPKTLVHDNMLTAVIERDGPLVRFNDAFLDFLRPLKITPRPCNVRQPQEKGKVEKGAIHFIRHNFWPLRTFTGLRDVQEQANGWRDQVANVRVHATTGQRPVERHKPDAMQPLPELRADCRDTAAAKVHTDFCIHFDGNTYTVPPWLIGKTVIAKADHRKLTVYFKQKAVAEHERSWQRRQRIELSAHREAARKYKDKQHRCAEVAALISLGEAAKDYYERIVGAALPLKKNVARLLYLKDEYGAHAVLEAMKRAAAHNAYGAHYIENILYQEMTPQRLHQPVTLKQRELNRIRLEEPLLEEYDSFVVKRRSRHHD

SEQ ID NO: 201 - protein, 493 aa, synthetic construct
MIERRIVFEIHRLKDAGYSARWIARELRLGRETVKQYLAHPERTVLPRKPRASKLDPYREMIDGFLAQAPHVKAPVILQRLKKEGFDGKATIVRSHLQKKREEGRVKWEAFIRFESAAGKQLQIDWGHFGSLTYGTARRKLYALAVIEAYSRMLYVEFTHSQKQEALHQGLLNAFRFFNGTTEEVVVDNMLTAVTERCGSVIRFNDAFLDFLRVFKIVPHACNIRAPQEKGKIEKSIDYLRHNFWPLRTFTDLDDVQRQVNHWRDTVCNVRIHQTTGERPLDRFSRVKNLRPLPPLLPDCRETASLLVHQDFAVRFDDNSYTAPPWATGRYITLKADQTTVTLYHKQKQIAAHHRTWERKQRIELAAHREQVEKFHRKLWQDRDIALLSSLGQEAIDYLAGLAETRLPIKKNAAKLLELKDQYSVASLIDAIKKALAHRAYGADYIENILRQEHMPKKNHPPVKLKNDELNNIRLQEPSLADYDAYILKRRKE

SEQ ID NO: 202 - protein, 523 aa, synthetic construct
MAGKSTNMSRIKQVLQLSGNGVSNRQIAKDLDINKETVNNYVRFFGSDPLSLKEVLKMEDPELEARFRAGNPAYTDYRHQTFLDELPDFKTSLGHKHVTRFLVWQDYIAKHPDGYRKTQFFHHLKQQLAAATPTTVLSDTYVPGEKLFVDFAGDTLEYVNTETGEMIKVQVFVACLPYTDYAFALCIPSQRVEDFLYAISKCMDAIGGVPKILVTDNLKSAVIKADKYEPTLNKALEDMGNHYRFVTIPCRPYSPTHKALVENQVKIIYRRVYAKLRNTAFYSLEDLNEAVWQKMLEHNQTRMQQRPYSREEQFFAVEKNALSPLPEQPYQMKFTCDLQVRNDGFVYLARDKHYYSVPFVHIGKRSHVIYTRTLVKIFVNNEVVATHERHLGFGHTHKNEHLASNSNAILSRSPEYYQEKADKHSAVFKQLVSDMFLDLEQRQIPPEFKYKTCDFMLSIGRKTPMADFEQACQIAIQNRSYSGKFLQNVISNLNVAKSQSESKERINPQPTNHENMRGNSYYK

SEQ ID NO: 203 - protein, 489 aa, synthetic construct
MIDYETYVRIRNYFSNDGLKYSQIADELGLDCRTVAKWASEERYLPRRSAKRASKLDPFKNEIVRMLERHPYTARQIFQRLQEGGFDGGITILTDYVRKIRPPKVTPYLKLVFAPGECAQVDWGTYGNVRVGSTSRRLSFFIMVLCHSRMMYVEFTVSQTMEHFLGCHQNAFHFFGSVPQKIMVDNLKSAVLKRTIGKDPVFNPRYMDFANHYGFKIVPCNVGKGNEKGIVENAVGYVKKNLLNGLAITDFKIMKPLVQHWLDKVANVRKHGETGKRPVDMFTEEKPSLQPLPVEPYDIGVVKQVRASRQFRVTIDTNRYSVPAQLAGVGLTLKLYPDRLCFYHENKLVARHVRSYDRRQDYEHPDHPKVLLAQRKKARDQKIFMRFLSLSNKAQDYYRQMQQRRMNPFHHIRQIVALSEIYPPEQVTRAIEDAFHFKAFSCDYIANLLEQRSRQVKEPGALHLTRSSDLLDLTINKPDLSIYDIGGEK

SEQ ID NO: 204 - protein, 489 aa, synthetic construct
MIDYETYVRIRNYFSNDGLKYSQIADELGLDCRTVAKWASEERYLPRRSAKRASKLDPFKNEIVRMLEKHPYTARQIFQRLQEGGFDGGITILTDYVRKIRPPKVTPYLKLTFAPGECGQVDWGTYGNVRVGSTSRRLSFFIMVLCHSRMMYVEFTVSQTMEHFLGCHQNAFHFFGSVPQKIMVDNLKSAVLKRTIGKDPVFNPRYMDFANHYGFKIVPCNVGKGNEKGIVENAVGYVKKNLLNGLAITDFKIMKPLVQHWLYTVANVRKHGETGKRPIDMFTEEKPSLQPLPVEPYDIGVVKQARASRQFRVTIDTNRYSVPAQLAGVGLTLKLYPDRLCFYHENKLVARHVRSYDRRQDYEHPDHPKVLLAQRKKARDQKIFMRFLSLSNKAQDYYRQMQQRRMNPFHHIRQIVALSEIYPPEQVTRAIEDAFHFKAFSCDYIANLLEQRSRQVKEPGALHLTRSSDLLDLTINKPDLSIYDIGGEK

SEQ ID NO: 205 - protein, 493 aa, synthetic construct
VIDFAQYTRMQHLHKEDKLTHQQIAQKLSLDSKTVAKWLKRERFDARKNAGRSSKLDPHKALIRAWLEKHPYSAQQIFQRLIAENAFSGGYTIVKEYVRKVRPRPEKAFLSLSFAPGESAQVDWGHCGTIAVGNTRRALSVFVMVLSHSRQMYIEFTLSQKQEHFLACHEHAFEYFGGVPQSVMVDNLKSAVLEHKRGETPRWNPRYADFARDYGFEIVACNPRAPQEKGRVENGVGYVKKNFLAGRQFQDFHHIAPSARQWLDLIANERVHRVTQQKPRVLWEAERAHLQSLPLNPPETARILRQRATSTFRLCIETNRYSVPAQYASHTLEVHLEAQELRVYHEGSEVARHRRDYGRHGDFENPDHPKALLAGRQKARAHKALQSFLQLGEHAEAFYHGLQKRRLNAPMHLRKIIALEGVYTRAQLSEAISDAHQIEAYSSEYIINLLGQRERPLVQPGPLHLTRPGDQLDIETPQADLSIYDTTPTNQQK

SEQ ID NO: 206 - protein, 528 aa, synthetic construct
MAGTIKDMSLIKQVIQLKQLGESNRGVSRKLSINKGTVNDYVNTIQRNGWDYGGLLSKDDPELERMFHAGSPAYSDRRMPDFLALLPYYKKQLSNPKLHVTRQLLYEEYRAGHPSGYGKSQFYFHLQQNLVAQKGCTAVLTETYNPGEKLMVDFAGDKLGYIDTATGEVIKAEVFVACMPYSDYTYVICVPSQKTEDFLFAVRMSLEHLGGVPPILTPDNLKSAVISNDRHEPKLNKALEDMGNHYHFVVLPCDPKKPTQKALVEDKVRTTYNRIYAKLRGRTFHSIMELNKAVWEQLSLFNKTRMQKRPYSREERFHAAEKGRLKPLPQNVHEMKFYATLQVQGNCFVELRQDKVTHFYSVPYIYVGKKALVIFTRSVVNVYVDGIQAASHMRSHEYGHTYLKGHLASNCRAIMERSASYYITWASRISPECGDYISEVFNPQRTNQPEEVYYKLCASIMSLSRRYETKIINKTCKQCIDFKIFSYRKFESVLKHNTLIASEDEPATCFEAPVPTDHVNMRGSSYFQ

SEQ ID NO: 207 - protein, 516 aa, synthetic construct
MSKIKQVLIMHKQGMSNRDIASEIGINKCTVNDYMRKIRLEPLGIDELLALDDPVLEGRLFAGSPAYTDPRMEEFLKELPYFIDQLKIPHVTRFLLWEEYIRKHPDGYGKSQFFFHLKQNLVVEKTPVGVLTNRYEPGKELFVDFAGDTQSYIEPSTGEVIEVQVFVATLPYTDYAFAFCIESQKVEDFLHCIRMCLEYIGGVPKILVSDNLKSAVIKSDTYEPTLNKALEDMGNHYHFAVLPARSLHPKDKALVESQVSRIYHKVYARLRNRQFYSLQELNEAISQALLAYNQTRMQLRPYSREEHFHSSEKSALQPLPDTIYEMKCYANVTVRETGEVYLSCDKHFYSVPYELTGRKASILYTRSLVKVYVDNKSVAIIPRDRTPGEHTQIPAHLPPNVRAYLERSPESYCDKAKHVSESLEKLFQSMFFNRATGVNFDVYYRSCEKMLSLQKKTASSLFDKACDVCRINHIYRGTGLEDVINAMGKTIADEESERSTVIPSNHENTRGPAEYK

SEQ ID NO: 208 - protein, 494 aa, synthetic construct
MIDRKTVFDIYRFKDAGYSARLIAREMRLGRDTVIKYLKNPDGALQARKPRPSKLDAYRDMIDALLEEYPFIGAPVVLQRLQEKGFDGRITIVRDYLHKQRGKVLKSRQAFVRFESSPGRQIQVDWGHFDTLTYGTTKRKLYALAVVESFSRMLYVQFTHSQRQEVLHRGLLNAFDFFGTIPEEIVVDNMLTAVTERCGRIIRFNDAFLDFLRPLKIIPRACNIRSPQEKGKIERSIQYLRHNFWPARSFSDLTDVQHQVRQWLDAVANVRIHQTTGEKPIDRLTQIIPKPLPEGLPDCRETETVLVHKDFAVIFDGNQYTAPPWTVGKHLILKADDHTVTLYHLQKQVTAHCRSWERKQRIELPSHREQVKKLQNKLWRERDVALLSCLCPEAVDYLAAIACARQSVKKTASVLLTLKDKYGETALISAIRKAMLHKAYGAEYIRSILHQESTPKKQHPPVKLKNEELNAIRLAEPSLAEYDAYILKGRNNYE

SEQ ID NO: 209 - protein, 511 aa, synthetic construct
MNHLQDLINRLRTGESERRIAQDLKMSRPTVHKYKLWAEQQGYLDPGQPLPDLATVLAALGPVRQPPQMTSSLASYQEFVEQLLDQGVEMTAIWQRLRESHQYQGSYSAVRRLVQRLRPKAAEAFVRVQTKPGEEMQVDFGNAGQLFDPVTGRLRSAYVFVATLGYSRHQYAELVFDQKVPTWLALHRRAFESFGGVPERVVPDNLKPAVLKALVHDPILGEAYRRLALHYGFLVSPTVPYTPRHKGKVESGVHYVKRNFLAGQEFVDLSVANQRLAVWVREVAGTRIHGTTRQVPLRLFYDYEQALLQPLPATPFTLLQIKPVKVHPDCHVIIDGSYYSAPYQYINQTLEAHVSEHMVELYAGLELVATHLRNTHPGQWQTRLEDYPPAKAAYLIQTPAYCRQQASRIGPATRQLVDTLLGERPLQRLRAVQAILGLRQSVGPDRLEAACARALFYGDVRYRRVKQILNAALDREPLPEPPSPPPSSSQPFTFARTSQEFFPPEAEGQPC

SEQ ID NO: 210 - protein, 508 aa, synthetic construct
MDIREIMRHLRQGRSDRAIAQATGMDRKTVGRYRAWAIEQGLLDGELPTLGELNRLMEETLKSTPPPQNVSSVEPYREVIETLHKAGVEATAIHQRLQERGYSGSYSSVLRFVRRLEPPAPKVTVRVETRPGEQAQVDFGYAGRMIEPETGELRRAWAFVMVLSWSRHEYVEFVFDQTVETWLRLHRNAFDFLGGVPRQVVIDNLKAGIVQACVHEPQAQHAYRECAEHYGFLISPCRPRTPEHKGKVEQGGVHYVKRNFLAGREPMTLPQANREVLRWVETTAGRRIHGTTKEQPLVRFETERQALLPLPSTPYDLAVWKQVKLHADCHVTFEQAYYSAPFRLVGQMLWVRGGTREVQIYTSDYQLKATHPRAQKPGQRLTNLDHLPPHKLPGLILSREGCRQRAAEIGPATGEVVGVLLDHRPEDRLRVAGRLLRLAERFSPDRLEAACARAIRFDDPAYVTIKHILEQGLDREKLPAITLAPPAQTFVRTADELVSHLKGGVSWN

SEQ ID NO: 211 - protein, 493 aa, synthetic construct
VIDFAQYTRMQHLHKEDKLTHQQIAQKLSLDSKTVAKWLKRERFDARKNAGRSSKLDPHKALIRAWLEKHPYSAQQIFQRLIAENAFSGGYTIVKEYVRKVRPRPEKAFLSLSFAPGESAQVDWGHCGTIAVGNTRRALSVFVMVLSHSRQMYIEFTLSQKQEHFLACHEHAFEYFGGVPQSVMVDNLKSAVLEHKRGETPRWNPRYADFARDYGFEIVACNPRAPQEKGRVENGVGYVKKNFLAGRQFQDFHHIAPSARQWLDLIANERVHRVTQQKPRVLWEAERAHLQSLPLNPPETARILRQRATSTFRLCIETNRYSVPAQYASHTLEVHLEAQELRVYHEGSEVARHRRDYGRHGDFENPDHPKALLAGRQKARAHKALQSFLQLGEHAEAFYHGLQKRRLNAPMHLRKIIALEGVYTRAQLSEAISDAHQIEAYSSEYIINLLGQRERPLVEPGPLHLTRPGDQLDIETPQADLSIYDTTPTNQQK

SEQ ID NO: 212 - protein, 527 aa, synthetic construct
MKYSQHTTSTQARPSLREISGWYEHLRELHARLRPHFARPEVHQRAWRYLQAVLSDVPRKNGWQIAEQAREAHPYGVQRLLATAVWDQDAVRDELRTLVHQTLLPSEAEQEDEALFPVLVLDQSGFPKRGRHSAGVGPQYCGVSGRVENCQVGVFLSYVTARGHALIDRELYLPEDWCADPARRLAAHIPEAVRFATKPELGQRMIERTKSAGLPIRWVAADTVYGHSPELRLFLEKQGYAYALAVPSTEVVCVQTRTGLLLREVASLAQQALRAREWQRLSPSQGTKGERLFDWARLPVVQAGSVDGCHWLLMRRCLDDPNELAYYLVWAPPETPLSTMVQAVGARWHIEEDLQAGKALGLDHYEVRSYLGWYRHITLVLLASAFLLGITIQNHLTASAPQESAACPALIPLTNSEARHEAFPPLLARSHLRVADLSVVDLSACPSVLGRLLSSSLSPESRVSLFVEPPGLPRTFPGSSPGKFQGVFQGKLPGGPQADSRSVVHPTRKEWFHDLCVFCPGNEESGH

SEQ ID NO: 213 - protein, 518 aa, synthetic construct
MAGKIVDMSKIKQVLRLHDEGKSNREIARMLNINKETVNNYVKTLKEHPSEMEKLLELDDPELERKLHEGNPAYTDERFNEFSSLLPYLQKELGRKHVTRRLLWQEYIEKHPGGYRFTQFCFHLKQNLVASSPTTVLSGTYNPAEKLYVDFAGDKLSYVDTRTGEIIKVEVFVACLPYTDYGFALCVPSQKSEDFIYAIRKCLEAIGGVPKILVTDNLKSAVIKSDRYEPEINKILEDMSNHYGFVTIPCQPRSPKQKALVENHVKLVYHNVYAKLRNQMFYSLEELNAAVSEKMHEHNQTRMQQRPYSREEHFLATEKELLCKLRNEPFEVKLYSDLQVQSNCCVYLGRDRHYYSVPYELIGKRARVIYTRSLVSIYVDGKKVAVHQRTEGFGYTIVREHMASNSQAVTSRSAQYYIDKAARISQDFCILLKAMFDRPGILPETQYKRCDGLFHLLHSSPLDDFNYACRTALANGCFRFSFIEGLVKNAKVIRQTCKVIDNPVPKDHANIRGKDSFK

SEQ ID NO: 214 - protein, 509 aa, synthetic construct
MDVYEVLRLLQLQKSDRAIAAALAINRKTVGKYRAWAASQGLLAQRELPSREELHRRLAATWPEALPPQNISSVTPFRAVIRELREQGVEVAAIFQRLQDEHHYAGSYSSVWRFVSALEPPRPDVVVRIEVKAGEEAQVDFGSAGQLRDPQSGKLRPAWAFVMTLSFSRHQYVEFVFDQKSTTWLLCHRHAFEYFAGVPERVVVDNLKAAIVRAAWDDPEVQRSYRECAEHYSFLIAPCRPGTPEHKGKVEQGGVHYVKRNFLAGRQPTALADANQAVLRWCEQVAGQRIHGTTKQKPWLRFCKVEQAALQPLPPTPYEPSTWKHVKLHRDCYVVFEQAFYSAPYALVGQSLWLRASARTVELYDAAYRRVAIHDRATAPGQRLTRLEHLPPEKVPGLLLNRSLCQAQAAASGPATSALVAALLAHRPEDRLRTAGRLLRLADRFTPQRLEAACARAQAYGDGDYVTVKRILQEGLDQRPLAVPWPTPATPHTFARPAAEFAAVTVGGV

SEQ ID NO: 215 - protein, 467 aa, synthetic construct
MKHHQHTTSEPAERTLRTIGTWVMSLHHLHQRLRPRFARPEVHQHVLLYLQAILSDIPRKNGWQIAEQARQARPYGMQRLLSHAVWDEDGIRDDLRALVCQSLHPPPLLPASLASTQVFAVLVIDESGFPKRGRHSAGVAAQYCGITGRVENCQVGVFLSYVTELGHALIDRELYLPEDWCADLLRRHAAHIPQTVTFATKPELAKRMIQRAQAACLPIGWVVADTVYGHSPDLRTFLEEQGYAYAMAVPSMEVVCVQTRTGLLLRDVGSLAQQALHAREWQRLSASQGTKGERLFDWACLPVVHGGTADGRHWLVIRRCLDTPDELAYYLVFAPPNTPLSTMVQAIGGRWHIEEDLQATKALGLDQYETRSYQGWYRHITLVMLAYAFLVNICLQQPAHLASHEEPSNRSPLVPLTASEVRHLLARLFFPAPSSVPLISQWSLFRRTHQYWAGYYHRRRRQKAGSA

SEQ ID NO: 216 - protein, 496 aa, synthetic construct
MVTDSGQINTIYRLHHEEKWSVRRIARELHIARKTVRKYLRAPAGEITKSKPRKTKLDGFKPIIRELVERDPKASAVVIAERLRPLGYTGELTILRNYLRTLRGIVQVPRAFIRVESSPGDRFEVDWGHFGSLDYQGDKRKLYAFCLIECHSRRLYVEFTHSQSFETFVRCHLHAFRFMNGVARECLYDNLWTAVTERDGRIVRFNPRFLAFAHEFGFYPRACNPGAGWEKGKIERGGVGYLRQNFWPLRTFKDLNDVNRQARQWLDEVANKRIHSLTRERPNDRFRPEALRPMPGLNPDYRDTVVTRVHKDIRVCFEANYYYVPPAYVGRVLLIKADSSSVTIYDRDREIIRYPRCWRRGQVFGAERFEKELLERRPGAERTKGQQRLVALVGPIAETYLRGLADTDRSMTSQLRQLSALVREYGPEALASALTKAQAAGAFGSDYIANILLQEHSSREPQPPLRLRDCRLNELTTDPLSLLDYDALILSERSEP

SEQ ID NO: 217 - protein, 522 aa, synthetic construct
MAGKTKDMGDIRQVLMLHQAGYSNRQIARETPINKETVNNYMKTVSELKLDIAALLRMEDPELERMFHQGNPAYTDERMDVFIKELPYYKEQLKDKHVTRLLLWEEYKQRHPNGYGKSQFFFHLKQNLVAAKAPTAVLTYTYDPGLYLFVDYAGDKLEYIDSETGEIIQVEVFVAALPYSDYEFAFCVPSQKLEDYLYAMRRCFEFIDGVPKIVVCDNLKAAVIKASHYEPTLNRAFEDMGAFYHFAIVPCQPHSPTQKALVESAVRRVYHHVYAKLRGRTFYSLQELNAAIEKLIREHNQTRMQKRPYSREERFLAKERASLQALPEGEFEIKYYAHPKVQYNNFIELGKEKHQYSVPYQYIGQKADVIFTRSIVKIFIQGKLVATHQRSFTWGYTYVREHLASQNNAIMERSPQDFIERGARVTVNCRKYMEALFDPERTSTPPEVFYKTANMILALGRKSDYSHFDKACEVCIELNVFSGRRFESVLKGPMLMSDTKDEDNLPPTPTNHENMRGAQHYA

SEQ ID NO: 218 - protein, 458 aa, synthetic construct
MKSSQSTTAEPAVPTLGPIGTWAMSLLHLHQRLAPHFARPEVRQHALLYLRAILSEIPRKNGWQIAEHAREERPYGMQRLLSRAVWDQEGCRDELRALVRQALSPPPLVPASAEHEPLYPVLVLDESGFPKRGRHSAGVAPQYCGVSGRVENCQVGVFLAYVTERGHALIDRELYLPDDWCADLPRRRAAHIPDTLSFATKPELAKRMVQRAQAAGLPIRWVVADTVYGHSSDLRNWLEEQGYAHALAVPSTEVVCVQTRAGLLLADVASIAQRALRAQDWQRLSASQGTKGERRFDWARLPLVHRGEVDGRHWLVFRRCLDDPHELASYLVWAPADTPLSTMVRAIGARWHIEEDLEVSKDLGLDQYEVRSYLGWYRHITLVLLAYAFLVSICVQATRPLPAQALIALTPSEVRHLLARLLWPAPTSALLICQWSWWRRTHQYWAGYYHRRRRQKAA

SEQ ID NO: 219 - protein, 389 aa, synthetic construct
MQRLLSRAVWDEEGVRDELRAFVCQSLKPPPVGPARAEPAAVFPILVLDESGFPKRGSYSAGVQKQYCGTTGHVENCQVGVFLSYVTALGHALIDRELYLPEDWCHDLPRRRAAHIPEPVTFQTKPELAVRMVQRAQSASLPIRWVVADTVYGHCPDLRLWLEAQGYAYALAVPCTEVVCVQTEEGYLLSDVASIARRVLSAQDWQRLSQSQGTKGERLFDWAMLPLVHRGMVDQRYWLVFRRCLDDPTQMAYYLVFTPLATPLPIIVQAIGARWCIEEDLEASKDLGLDHSEVRSYLGWYRHITLVLLAYAFLVGLCVQDSLHCSVQEKPPPSSSLIKLSTSEVRHLLARLIWPPPTSALLICQWSCWRRAHQYWAGSYHRRRREKAG

SEQ ID NO: 220 - protein, 494 aa, synthetic construct
MIDYETFVKIKVLKDQHALKCSQIARELNLDNRTVEKWLEKKRYQQRISPPRASKLDPFKERIVRMLETYPYSAAQIFQRLKEDDFDGGYTIVKEYVRKVRPPKIKAFLKLSFAPGECAQVDWGSYGSVSVADTRRRLSFFVMVLCYSRMMYVEFTVSQTMEHFLGCHQNAFDCFGAVPGKIMVDNLKSAVLKRIVGKDPIFNPKYMDFANHYGFTIVPCAVGKGNEKGRVESGVGYVKKNFLAGLEIPDFNALNPAVTHWLNTVANVRIHGETGKRPVDRFQRERQSMIQLPAYPYDIATIDQVRASRQFRVAVDGNRYSVPAEYAGAALTLKSYPDRLCIYHQQNLIARHVRSYDRRQDFELPDHPKALLAQRRKARDQKIFMRFVSLSDKSDAYYRQLEQRRMNPLHHIRQIVALSEIYGQQSVQRAIEDAFAFQAFSCEYIANLLEQRTRTLPEPGALHLTRSQDLLEITVEKPDMEIYNKSLKKSEEKS

SEQ ID NO: 221 - protein, 492 aa, synthetic construct
MIDYETYVQIRNYFENEGLKYSQIAQALDLDCRTVARWANEKRYQPRKFTLRKSKLDPFKNDIIRMLEKHPYSATQIYQRIKQNGFDGGSTIVEDYVRKIRPPRSKAFLKLVFAPGECAQVDWGSYGSVRVGSTRRRLSFFVMVLCHSRMMYVEFTVLQTMEHFLGCHQNAFQYFGAVPQKIMVDNLKSAVLKRIMGQPPVFNPKYLDFAKHYGFTIAACNVGKGNEKGVVENGVGYVKKNLLNGLDITDFKIMQPATQHWLESVANVRTHGQTGQKPVDMFAKEKIFLQPLPHEPYDIGVVRQMRASRQFRLTIDTNHYSVPAQLAGVRLTVKLYPDRICFYHDNNLVARHVRSYDRHCDFEHPDHPKALLQQRKKAQDQKIFMRFLSLSDKAQQYYRQLEQRRLNPFHHIRQIVALSEIYGNEAVARAIEDAFSFAAFSCEYIANLLEQRSRRVKQPGALHLTRSSDLLDLTIDHPDLSIYTINGDDNHE

SEQ ID NO: 222 - protein, 521 aa, synthetic construct
MANRRIETMDIGEMVRLLRAGESDSTISALVGHNRRTVARYRRWAQGQGLLTGEMPRTADLHRLVRTTWPRRLPPQQVSTLAPYTEEVRAYRELGLEMAAIRCRLEERHGHPVSYSAVRRLVAHLEPAAVEAVTRVEVAPGSEAQVDFGYAGLCLDPQSGKARKAWVFSMVLSWSRHQYAEVVWDQGLPTWLLCHRHAFEFFGGVPARLVPDNLKAAIVRASFTEPVAQRSYRECAAHYGFLIDPQPPRAPWLKGKVEQGGVHYVKRNFLAGREPAPRDELNRALRRWCEHTAGQRVHGTTKCRPLERFRQVEHAALRPLPPTPYEGGIWKQVQVYRDCYVTVEGAYYSAPYRLVGQVLWVRGGSRTVELYTTEHQLVATHDRASAPGERQTHLDHLPPEKVAGLTLSRERCRLQAAAIGPATAAVVDGLLDHRPEDRLRAAGRLLQLVQTTSPARLERACARAQAFGVGDYATVKRILQEGLDQHVLPLVAPAPADSPPRAYTFVRQAGEFMSALLGGAR

SEQ ID NO: 223 - protein, 492 aa, synthetic construct
MIDYQTYCQIRHLLTEKKLGLRQIARELKLGLNTVRKWAGRESFKPAAIPQRPSKLDPFKGDIVRLLEQHAYSAQQIFQQLKERGFQGRYTILKDFVRQVRPKPRPAFLTLHFAPGECAQVDWGCAGSVPVGSTQRRLSFFIMVLAFSRKMYLEFTLAETLEHFLSCHQHALEYFGGVVRQVWVDNCKVAVLSRAAGSITFNPRYLDFANHHGFEIRACGPSQPQEKGRVENGVGYVKKNFLHGLPLSDFKAVNPAARYWLDTVANVRVHGQTQKTPQELFTQEKLNPLHPLPYEVAVVGTIRVNSQFRIIVDGNRYSVPCQYASSQLTLKRFADRLLVYDREKLVAEHVRRYDRNQDYELPDHVAPLLLHRKRAREQKLFLRFLALCPKADDYYHQLEQRRLNPKHHVQKIVALSELYGIEAVARAMEDAFTYQAFSCEYIANILQQRQHPPTEPGALHLTRQQDLLELDLPAPDLSIYDSKNHPDSPTPL

SEQ ID NO: 224 - protein, 517 aa, synthetic construct
YESLCRWHYSCTWKGRNTPWNLPWTPAHFALFSLRCDMLEVATLLTASFIESENRMKHPEHTTPVQVGPTLREISRWHEDLRELHGRLRPHFARPEVHQQALRYLQAVLSDVPRKNGWQLAEQARQAHPYGMQRLLSQAVWDQEAVRDEVRRLVSETLRSPRPQEADEAPFPVLVLDESGFPKRGRHSAGVGPQYCGRTGRVENCQVGVFLSYVTAQGHALIDRELYLPEDWCADPARRQAAHIPEAVRFATKPELGQRMIERTKSAGLPIRWVVADTVYGHSPDLRAFLEEHGLAYALAVPSIEVVCVQTRTGLLLADVASITQQVLRARDWQRLSQSLGTKGERLFDWARLPVAQAGVADGRHWLVVRRCLDDPHELAYYLAWAPADTPLSIMVQAIGARWHIEEDLHACKALGLDQYEVRSYLGWYRHLTLVLLAAAFLVGITVQDHLSASAQEQSVACPALLPFTTSEARHVLAHLFWPAPTSAPLICQWSLFRRTHQYWAGYYHRRRRAKTG

SEQ ID NO: 225 - protein, 497 aa, synthetic construct
VPGIRISDLQVTKYKQLRGKHTQEAAAAKAGISVASARRIESAVLLPSQRPLRSWRTRADPLEDVWQSQVVPMLESAPALMAVTVLEELQRRYPQRFDGAVLRTLQRRVRQWRAEHGAEREIFFAQVHPPGRLGLSDFTVCDALGVTIAAVTLQHRLYQFVFAHSGWRHARIVLGGESFQALSSGLQEALWMAGGVPEEHRTDSLSAAFNNLAEQEELTARYSQLCEHYGLRASRNNLGQSHENGSIESRQGSLKVALEQALLLRGTREFADIQAYGQFVAETVRQMNARCARAWEVERASLRPLPVRRTGDFEELDARVSKYGVFTAKGVTYSVPSRLVGHRLKVRLHSAHLEAWLGGVKVFECERLRGSVQDRHPKRIDWRHMMPSLRRKPGAFARWVLREAMFPRSEYAQTWQRISERLCEREACRLMVDLLDLADRANVVVELAGVLAVLGERNELPDIDVLRAQFAPRPTLMPEVEVMLPPAAVYDELLEAA

SEQ ID NO: 226 - protein, 502 aa, synthetic construct
LPGRHVTDRQMRLFMQFRKSDPAAVAAAKAGFSPATAYRLEKDPRLPSQKKPPRSRRRPDPLEGVWEKEVLPMLKAAPGLRPIGVFEELRRRHPDLAPGVRRTLERRIRNWRALHGPEQEVIFRQEHPPGRMGLSDFCDMRNLGVCIAGVPLEHRLYHFRLPFSGFESAHVVLGGESFVALAEGLQNALWALGGAPQQHRSDSLSAAFRNLDADAREDATMRYEALCAHYGMTPTRNNPGVSHENGSIESAHGHIKAALEDELLLRGSRDFDDLPAWRKFVDELVSRRNARNAARIDLERADLKELPPRKTSDFEEERIRVTSSSAFTVRKVFYTVPSRLIGHKLLVRLYDDRLEVFQGSTHLFDLPRGRPRPNGKHGHVVDYRHVIHSLRRKPMALLNLVYRDQLFPRRAYARAFDALLAEAGEKAACKTMVGLLALAHERVCEAELAAAIEEELDAGRLPDLAPLTERFAPKTAAAPNVVVALPDLTVYDALASLEGAAA

SEQ ID NO: 227 - protein, 497 aa, synthetic construct
MIDYLTYCQIRSLRQDEKLTAGQIARKLQLDKKTVRHWLRHPYHEPKRPNRSSKLEPYKPRIQAWLQQHDYTAQQILQKLRAEGVQVGYTIVREHVRSVRPKPVRAFLTLSFCPGECLQVDWGSWGLIPIGSTRRRLSFFVAVLCYSRLMYVEFTLGQSQEHFLRCHQNAFGFFQGVAGSVMVDNCKTAVLRHPLGQPAQINPRYLDFANHYGFTVRACGVRKGNEKGRVENGVKFVKENFLRGLDLPPWPALNPAARHWLETIANVRVHRGTHQPPGELFAEERPKLTPVTALPYDTALVRPLPVNSRFRVVWETNRYSVPAHWAGSTLTAKIEAERIALYHQDQPVAEHVRSYDRHQDFEHPDHARPLLAQRQKAREQQLLTRFLSLCPQAPAYFEQLQHRRLNARHHVQKILALVEIYGPDLVTRALQDAHHYQAYSCEYIANILEQRQRKLPEPGALHLTRSADLLELELPEPDLSVYDPKPNPSDPQTAYES

SEQ ID NO: 228 - protein, 488 aa, synthetic construct
MIDRRMVFEIHRLSQEGYKIRQIARTLKLSRESVKRYLDNPHPPRPVIVRTGKLDSFKPEIQRLLEQAPAVSGAVLLQRLKAQGYTGGITILRDHLQEVRPKRKRAYLRFESPPGEQFQIDWGHFGSLVYGKTPRKLYGLAVIEAHSRMLYAEFTHSQKQEALHQGLLNAFRFFQGTPREILTDNMLTAVLEREGSIIRFNEAFLEFLRPFRITPRACHPYQPQEKGKIEKGGIHYLRHNFWPLRTFTDLLDINRQLRHWLDTQANDRLHSTTGERPVDRFRPDALQPLPEFTPDCRETLSLKVHSDFAIRFDSNFYSVPPWAIGKTVIVKADLTTVTIYYHEKTLATHTRCWQKRQRIELPAHREAAFKRRPQEWLATEVSVFISLGEEAKNFLEGLAHTGQPIKKNLAKLLALKDRFGTPLFLQALKRAMDHKAFGAHYVENILHQEKSPKQDHPPVQLQRQDLNRIRLEEPLLADYDAYILKRKD

SEQ ID NO: 229 - protein, 492 aa, synthetic construct
MIDYETYVQIRNYFENEGLKYSQIAQALDLDCRTVARWANEKRYQPRKFTLRKSKLDPFKNDIIRMLEKHPYTATQIYQRIKQNGFDGGSTIVEDYVRKIRPPRSKAFLKLVFAPGECAQVDWGSYGSVRVGSTRRRLSFFVMVLCHSRMMYVEFTVLQTMEHFLGCHQNAFQYFGALPQKIMVDNLKSAVLKRIMGQPPVFNPKYLDFAKHYGFTIAACNVGKGNEKGVVENGVGYVKKNLLNGLDITDFKIMQPATQHWLESVANVRTHGQTGQKPVDMFAKEKIFLQPLPHEPYDIGVVRQMRASRQFRLTIDTNHYSVPAQLAGVRLTVKLYPDRICFYHDNNLVARHVRSYDRHCDFEHPDHPKALLQQRKKAQDQKIFMRFLSLSDKAQQYYRQLEQRRLNPFHHIRQIVALSEIYGNEAVARAIEDAFSFAAFSCEYIANLLEQRSRRVKQPGALHLTRSSDLLDLTIDHPDLSIYTINGDDNHE

SEQ ID NO: 230 - protein, 500 aa, synthetic construct
VPGRHVNDHQMRLFMKFRQDDPVPVAAAKAGFSAATGYRLAHDPRLPSTRRAPRERRRPDPLADIFDAEIVPLLKAAPGLRPIAIFEEMRRRHPELDPGVRRTMERRIRAWRAVHGEEREVIFRQIHEPGRMALSDFTDMAEIGVTVAGAPLDHRLYHFRLAWSGFEHVHVVLGGESYVALAEGLQNALWALGGAPLEHRSDSLSAAFRNLDAEARADLTRRYDALCDHYGMAPSRNNRGVAHENGAIESAHGHIKTAIRDALLMRGSSDFDDLALYRRFVDEVTSARNRRNGARIDAERAQLQPLPDRRTSDWEETIVTVTSTGGFTLRKVFYTVPSRLIGHRLRVRLFDDRLALYIGGTHLMTLARGRAASSGKHGHVVDYRHVIHSLRRKPMALLGLVYRDQLFPRDAYRRTFDRLIERMPERTACRTMVELLALAHDRACEAELADCLAADLAADRLPDMAALRARFAPDPASLPEVVVRLTPLADYDSLLAGAAA

SEQ ID NO: 231 - protein, 502 aa, synthetic construct
MNDIRDIYERVRRGQSDRAIAQDLHLSRVTVRKYREAFAGVRDEAAVEQLLEELTSHDHRPAQTISSVEPYRSAVQELLDRGVEAMTIYDRLRADHGYGGSYSSVRRFVNKLMPRTPDATVRVHTAPGEEAQVDFGAAGTFFDPASQRVRPAYVFVMTLSYSRHQYAELVFDQKIPTWLGLHRRAFASFGGMVSRVVLDNLKAAVLEAALHDPVLGEAYRRFARHYGFLISPNRPSTPEHKGKVESGIHFVKRSFLAGQEFADIRSANQRLAEWVRERAGTRMHGTTRQTPLALFERERPCLQPLPDVAFELTEIRLAKLHRDCHVAVDGSWYSAPYQYVGQRLEVYLFERLVQIFSGLHLLATHVRATTPGTWRTNRDHYPPEKAAYLEKTPVFCREVAQRIGPATFEVVDTLLDERPLDRLRSVQAILRLTETVGKTRLEAACRRALHFGDSRYRRIKDILNAALDQQPLPELPARAGQVAFTFARTPEELFGPDEVASC

SEQ ID NO: 232 - protein, 489 aa, synthetic construct
MIDYELFCKIRHLKEHEGLSAHQIAGELAMDPRTVVKWLTRERFCQRKASVRASKLDPFKTEIARMLQAHTFTAAQILVRMREQGFAGGYSIVKDYVRSIRPPKSRAYLTLAFAPGECAQVDWGSYGSVTVGNTRRRLSFFVMVLCYSRMLYVEFTVSQSMEHFLACHQNAFRFFGCAPKKIMVDNLKSAVLRRIVGRPPVFNPRYLEFANHYGFAIAPCNVGRGNEKGRVENAVGYVKKNFLAGLEIPDFAAIAPAARSWLETVANVRTHGETRKKPLELFEAERPCLLPLPINAFDIATVSPQRASSQFRITLDTNRYSVPAEHAGRALTVKTDPERICIYAGDNLIARHIRSYERYQDFEDPDHPKALLAQRKKARDQKIFMRFLSLSPKADLYYRKLQERRLNPQEHVRKIVALSEIYGTDPLARAIEDAFVFEAFSCEYITNLLQQRTRFNKEPAALHLTRREDLLDIRLEHPDLSVYERISDE

SEQ ID NO: 233 - protein, 489 aa, synthetic construct
MIDYELFCKIRHLKEQEGLNAHQIAGELVMDPRTVAKWLTRERFCPRKASPRSSKIDPFKNEIARMLQTHAFTAAQVLQRIRGQGFAGGYSIVKDYVRSIRPPKSPAYLTLAFAPGECAQVDWGSYGSVTVGNTRRRLSFFVMVLCYSRMLYCEFTVSQSMEHFLACHKNAFDFFGCAPKKIMVDNLKSAVLRRIVGRAPVFNPRYLDFANHYGFTIAACNVGRGNEKGRVENAVGYVKKNFLAGLEIPDFAAIAPAARNWLETVANVRIHGETRKKPVELFEAERPCLLPLPINDFDIATVNPQRASSQFRITLDTNRYSVPAEHAGRALTVKTDPERICIYAGDNLIARHIRSYERYQDFEDPDHPKALLSQRKKARDQKIFMRFLSLSPKADLYYRKLQERRLNPQEHVRKIVALSEIYGHEPVARAIQDAFVFEAFSCEYIANLLQQRARFHKEPTALHLTRREDLLDIHLEHPDLSVYERMSDD

SEQ ID NO: 234 - protein, 488 aa, synthetic construct
MIDYELFAKIRHLKEHEGLTAPQIAAELSLDSRTVRKWCAATFRPRKITPRSSKLDAFKRDIVCMLETHPYTATQIFQRISEDGFDGGYSIVKRYVRRVRPPKSPAFLKLSFAPGECAQVDWGSYGAVNVGSTQRRLSFFVMVLCYSRMMYVEFTVSQSMEHFLGCHQNAFDFFGLVPKKIMVDNLKSAVLRRIVGQAPVFNRKYLDFANYYGFSIAPCNVGKGNEKGRVENAVGYVKKNFLSGLNIPDFSAITPAAKNWLNTIANVRIHGETRQKPLDLFEKERPFLNPLPANPFDVATVSQVRASSQFRVTLDTNRYSVPAEYAGTRLTLKAYPDRLCVYSKDKLIARHVRSHDRYQDFEDPDHPKELLNQRKKAWEQKIFMRFLALSPKAEQYYHKLEQRRMNPHHHVRKIVALSEIYDPDAVARAMEDAFSFEAFSSDYITNLLEQRSRSLPEPGALHLTRREDLLKIKVDQPDLSIYERKHHD

SEQ ID NO: 235 - protein, 489 aa, synthetic construct
MIDYETYVRIRNYATRDGLNINQISEELGLDQRTVARWVNQTRYLQRKPALRTSKLDPFKKDILQMLEKHRYTGRQVFQRITENGFEGGFTIVTDYVRKIRPTQTTPFLKLVFAPGECAQVDWGSYGTVRVGSTTRRLSFFVMVLCHSRMMYIEFTVSQTMEHFLGCHQNAFQFFGSVPQKIMVDNLKSAVLKRTVGRAPVFNPRYLDFAGHYGFTIVPCNVGKGNEKGIVENGVGYVKKNLLNGLCISDFGIMAPVAQNWLDTVANVRSHRETGKRPVDMFHEEKPSLQRLPLEPYDIGVVKQARASRQFRVTIDTNRYSVPAQLAGVGLTVKLYPDRFCFYHENKLMARHVRSYDRLRDFEHPDHPKAVLAQRKKAQEQKIFMTFLTLSDKAREYYRQLEQRRMNPFHHIRQIVALSEIYPKEKVALAIEDAFSFSAFSCDYIANLLEQRSRIIKEPGVLHLTRSSDLLDLTIEKPDMSIYNIGGEK

SEQ ID NO: 236 - protein, 488 aa, synthetic construct
MIDYELFSKIRHLKEHEGLTAPQIAAELALDPRTVRKWCAATFRPRKITQRTSKLEPFKRNIVRMLETHPYTATQIFQRISEQGFHGGYSIVKRYVRRVRPPKSPAFLKLSFAPGECAQVDWGSYGAVNVGSTRRRLSFFVMVLCYSRMMYVEFTVSQTMEHFLGCHQNAFDFFGLVAKKIMVDNLKSAVLRRIVGCAPVFNPKYLDFANHYGFSIAPCNVGKGNEKGRVENAVGYVKKNFLSGLNIPDFSAIGPAVRNWLDTIANVRIHGETRQKPLDFFEKERPFLNPLPANPFDVATVSQVRASSQFRITLDTNHYSVPAEYASSRLTLKAYPDRLCIYSKDKLIARHVRSYDRYQDFEDPDHPKELLKKRKKARDQKIFMRFLALSPKAEQYYRKLEQRRMNPHHHVRKIVALSEIYDPEAVARAIEDAFTFEAFSSDYITNLLEQRSRFLPEPGALHLTRREDLLDIKVEQPDLAIYERKHHD

SEQ ID NO: 237 - protein, 497 aa, synthetic construct
MPGKRITDHQVLKYKQHRNKLSQVASAAKVGISERSARRIDDAQGLPSQRPQRNWRTREDPLSAVWDSEVIPLLQTDARLNAVTLLEELQRRYPGQWDTSVLRTLQRRIRLWRAKFGAEREVYFAQEHPPGRQGISDFTVADELNVEIAGVVFTHRLYQFALAYSGWRHVAVIDSGESFMALSTGLQAALWALGGVPEEHRTDSLSAAFKNLAEQEELTKRYADLCSHYGLRATRCNPGQSNENGSIESRNNSLKTALEQALCLRGSRSFDTRPDYETFVDTIVQRMNTRAAKFLVTERAMLKPLPVRRTAEFEEIPARVSKYAVFTLKGVLYSVPSQLIGHRLMVRQYAQHVECWLGGQCVLSLPRARPAQGQRVGRAIDYRHLVGALKRKPGAFARWVLRDAAFPRAVYRQTWERLISERPEREACKTMVGLLVLAADGHEAQLAHELDQLMALDQLPDLNALTQLLAPPTGEVPQVVVTLPTLASYDVLLEVAL

SEQ ID NO: 238 - protein, 557 aa, synthetic construct
VGQQVSFPTFRTIVGHFFSFASYLCFVNTLNKDLMAGKIVSMSKIKQVLQLYDSRHYNREIARLIGLNKDTVNKYVNTFIESNKSLDELLKLEDPELEKMFNSGTPAYTDTRHKDFLNELPYLKKEIQRPHVTKHLLWEEYINKYPEGYRKSQFYYHLKQNTNAAKPTTVLTGTYIPGEKLFVDFTGDTMSYTDLDTGDTIRVQVFVASMPFSDYLFTICVPSQKVEDFLYAISKCFEFLGGVPKILVPDNLKSAVIRADRYEPTLNKALEDMGNYYHFVVIPCQPYSPTQKALVEDGVKITYNRIMAKLRNRTFYSLNEINQAFREKTLELNQTRMQRHDYSREERYVATEKEKLGPLPLRPYEMKYHRELLVHQDGFISLACDNHYYSVPYTLIGKKAKIVYTRSLVKIYIDGDLVASHERVKGFGYSKKDEHLAPNSLAILNRSPELYIKKSTAVSNEFGELITTIFSVCKKQKMVPEFYYKTCALLFHLHRISKDDDFNAACKIALDNKIYKGSFFKSILSNIKEAKVLNDKKEHQNPLPSNHENMRGNEYYL

SEQ ID NO: 239 - protein, 519 aa, synthetic construct
MELRELLRYLQLESSNRQAAAALGLDRRTVGRYRQWAAKHGLLEGPLPPPEALQALVESTLSEAPPPQSISTVTPYRDLVLRLRQEGVEIAAIYARLGEQGFQGSYQAVYRFVKALEPGKPEVMVRMETPPGAEAQVDFGYAGKFIDPHTGTPRKAWVFVMTLSWSRHQYAELVWDQSLATWIQCHRHALEFFEGVPQRLVIDNLKAAIIRACFDDPQVQVTYRECAEHYGFLIAPCRPRTPQHKGKVEQGGVHYVKRNFLAGRDPQPLSEANVALRQWCLNTAGLRTHGTTRAVPMTRFVSTERQALQPLPATPYDLSVWKIAKVARDGHITFDNAYYSVPCAQVGCQVQVRGSSTTVRIYDQDYHLLTTHTRATEPGDRVTKMEHLPPEKVAGALLDRPTCQATAAEIGPATAQVVQQLLDDPAIERLRPVISLLRLRETYGDARLEAACTRALHFNEYRYGMIKRILQQGQEHAPLPAPVNPSAPPPRTFVRSAAELLGHLFGGEVWNCDTNSSPN

SEQ ID NO: 240 - protein, 556 aa, synthetic construct
VREVSGACAEGRAEPDRRRKRRKSVWVLVWDRNRLVIAADSVADGFLVERNRPLPGRHVTDHQMRLFMTFRQSDAVPAAAAKASISAATAYRFEQDHRLPSHKAKTRGRRRPDPLADFFDAEVIPMLKAAPGLRSVAIFDEMQRRHPDLPAGARRTLERRIRSWRALHGADQEVIFRQVHEPGRMGLSDFTDMADLGVTIAGEQLDHRLYHFRLAYSGFEHAHVILGGESYVALAEGLQNALWALGGAPSEHRSDSLSAAFRNLDKNAREDLTRRYDALCLHYGMEPTRNNRGVAHENGSIESSHGHFKKAVNDALLMRGVNDFDDLGSYRRFIDEIVSRKNAHQAKRIETERPALQRLPGQRTCDYEETIVTVTSSGGFSLKKVFYTVPSRLIGHRLRVRLYDDRLDLFIGGTLLMTLTRGRADATGKRAHVVDYHHVIHALRRKPMALLNLVYRDQLFPREAYRQTFDRLLEKIPEKSACRLMVNLLALAHDRGCEAELATLLAADLAAGQLPDIVALRERFAPDPAALPEIVVQLTPLIAYEALLGNDMGEAA

SEQ ID NO: 241 - protein, 529 aa, synthetic construct
MGFEPMLTTAQINDLHRLYWSDHWPIRKIERHLHMGWETIKKYLDMPAQTPAGRPRSSKLDAYKTTIAELLEKDPSASAAVIGQRLRPLGYTGGGSILRHYLHEVRPQLKPQRAFVRMEPKPGERFEVDWGHFESLHYQGDQRKLYAFALVDGHSRMQYLEFTHSQSFETFVRCHIHAFQKLNGIARELWYDNLATAVAEHDGRLVRFNPRFLAFAREFNFYPRACNPASGWEKGKVERGGIGYVRQNFWPLRDFLDLHDVNRQGREWLDQIANRRLHSETRERPIDRFQPDALRCLPVITPDYRDTVEALVHKDMRLQFDGNRYCVPYRFAGRRLTLKADSSSVTIYDRVTEIVSYARSWRRGQTFGAERFEAELAEFRPAAKRSRAQDRLFSFLDGLCSKAALEAYLRDIADSDRSLSRQITELLELIRQYGPDAVAGAIEKAATARAFGADYVANILRQQQCPRREQPPLRLRDPRLNELVTDPLSLLAYDAFILESEKESDDTPGTETPRSESDGHEPPSGDDPL

SEQ ID NO: 242 - protein, 496 aa, synthetic construct
MIDYATWAAIGDGVAKHLTAAQLAVSLGLDVKTVRHWIGRPYAPRQAVRRSSKLDPFKGRIVGWLDAHPLSAQQVFQRLCDNGYGGGISIVKDYVRAIRPRPREAFLTLAFAPGEAAQVDWGEFGTIAVGDTRRRLSFFVMVLAYSRKMYVEFTLSQTMEQFLAAHVNGFHALGVPRKVMVDNLRCAVLQHRRGEAAQFNPRYLDFARHYGFEPVACAVAKGNEKGRVERGVGYVKGNFLSGLELPDFAALGQAAQVWLESVANVRVHRETHRRPTDLWADERAHLHAVNPRPFDVGRVLTLRATRQFRVNFEANRYSVPARFAGAQVTVKAYPDRVCIYHGEDLIARHARSFERHRDIEDPDHPKVLVAQRRHARDAQVLRRFFALTPLAVRYHAGLLERRGHALVHVRKIVALAEIYGDDAVVRALTDALAFEAFSSEYVAHLIEARSRQLPEASPLVLMRRQDVLELELPPADLSAYSDFARGHDDGGSDGHD

SEQ ID NO: 243 - protein, 498 aa, synthetic construct
VPGKKITDHQVRKFKEVRNRATQEIAAAKSGMSVRSARRIEEAKGLPSQVGARTWRTRSDPLAGVWDEEVVPLLESEPGLLGTTLFEELRRRHPERFEPGLVRTLQRRVRAWRAQHGGERETYFAQVHPPGRFGLSDFTVADELKVFVAGEAYPHRLYQFALAYSGWRYAEVVLGGESYMALASGIQNALWAIGGVPEEHRTDSLSAAFNNLAEEEQLTTRYAALCLHYGMRPTRNNLGVSNENGAIESRQGTLKVALDQALLLRGHRGFDCESDYREFVAEIVARMNHRVRSQTAAERPLLKALPVRRTSEFEEIEARVTKFGTLTVKRILYSTHSRLIGHRLKVRVYTERIEGWLGGVCVMEAPRGHLEAGQRRGKAIDYRHLLPALRKKPGAFARWALRDEMFPRSEYRRTWERLHEMLPERQACKTMVGLLDLAARGACEADLAGVLADLLQAGTLPELPGLEERFAPRVADLPEVEIKLPTLADYDALLQGAA

SEQ ID NO: 244 - protein, 492 aa, synthetic construct
MIDYETFLKIKHLHGRDGLKSSQIADELGCDERTVSKWLNENQYRPRKSSAKSSKLDTFKDDIIRMLEAHPYSAVQVLQRIRDDGFDGGYTIVKEYVRKVRPRRKKAYLTLSFAPGECAQVDWGSYGSVRVGDTTRRLSFFVMVLCYSRMMYVEFTVAQTMEHFLSCHQNAFLRWGAVPERIMVDNLKSAVLKRTVGKDPVLNPKYLDFANHYGFAVAPCGVGKGNEKGRVESGVGYVKKNFLSGLQIKDFTDLNPAAMRWLDTVANVRIHGETGKRPVDMFQEERPHLHRPPVHPYDIATISQVRASRQFRVVLDTNRYSVPAELAGQPLMLKTYPDRICLYHQEKLVARHVRTYDRRKDFELPDHPKILMAQRKKARDQIIFRNFLALHPKSDDYYRQLEQRRMNPLHHIRQIVALSDIYGKDQVTRAIEDAFVFRAFSCEYIANLLEQRNRKLKEPGPLHLTRSQDLLELDLDEPDIDIYSRFSIGDSE

SEQ ID NO: 245 - protein, 493 aa, synthetic construct
MIDYELFCRIKDLKENEGLTPPQISRELNLDVRTVAKWLSEPRFKPRQSDLRASKLDPYKADINRMLNCHPYSAAQVFQRIKEQGFDGGYTIVKDYVRQIRPGKKPAYLTLAFAPGECAQVDWGAYGSVAVGDTRRRLSFFVMVLCYSRMMYVEFTVSQTMEHFLACHQHAFEFFGGCVQKVMVDNLKSAVLSRIVGKSPVFNPRYRDFADHYGFSIAPCNIGKGNEKGRVENAVGYVKKNFLAGLDIPHFAAIGPAAQAWLDTIANVRIHGSTREKPVDRLEKERPHLRPLPAYPFDTGTVSQVRASNQFRITLDTNRYSVPAEYAGEPLTLKIYPDRLCIYFRDKLIARHVRSYDRHQDFEDPDHPKALLAQRRRAREQKLYMRFVALSPKAESYYRQLEKRRMNPRHHVRKIVALGDIYGADAVARAMEDAFFYQAFSSDYIENLVEQRRRLCPEPAPLQLTRAQDLLDLTIDHPNLSIYQAKPDKESES

SEQ ID NO: 246 - protein, 489 aa, synthetic construct
MTFRQTDGPAVSAAKASISTATAYRFEQDHRPPSAKAEPRGRRRPDPLVAFFDAEVVPMLTAAPELRAVAIFEEMQRRHPDLSDGVRRTLERRIRAWRALHGANQEVIFRQIHEPGRMGLSDFTDMADLAVTIAGVQLDHRLYHFRLAYSGFAHAHVILGGESYVALAEGLQNALWALGGAPHEHRSDSLSAAFRNLDIDAREDLTRRYDALCLHYGMEPTRNNRGVAHENGSIEGPHGHIKRAVADALLMRGTRDFGDLAGYRLFIDEIVSRKNAHHAKRIAAERAVLQQLPGQRTCDHEETIVTVTTSGGFTLKKVFYTVPSRLIGHRLRVRLYDDRLEVFIGATLLMTLARGRAATTGKHAHVVDYRHVIHALRRKPMALLNLVYRDQLFPRDAYRLTFDRLLEQLPDKAACRLMVDLLALAHDRGCEADLAVQLTADLAAVRLPDITALRTRFAPDPASMPEVVVHLTPLIAYEALLGTDIGEAA

SEQ ID NO: 247 - protein, 528 aa, synthetic construct
MAGTIKDMSLIKQVIQLKQLGESNRGVSRKLSINKGTVNAYVNIIQCNGLSYDDLLSKDDPELDRLFHAGSPAYSDPRMADFLAKLPYFKEQLSNPKLHVTRQLLYEEYKAGYSHGYGKSQFYFHLQQNLVAQKDCTAVLTETYNPGEKLMVDFAGDKLSYIDTETGEIIKVEVFVACMPYSDYTYVICVPSQKTEDFLFAIRMCMEYLGGVPPILTPDNLKSAVITNDRHEPKLNKALEDMGNHYHFVVLPCDPKEPTQKALVEDKVQTTYNRIYAKLRGRTFYSIVELNRAVWDLLSLFNKTRMQKRPYSREERFHAAEKDKLKQLPQNIYEMKYYANLQVQTNCFVELRQDKVTHFYSVPYIYVGKKALVIFTRSVVNIYIDGTQVATHMRSYEYGHTYIKEHLASNCRAIMERSASYYITWASHISPECRNYISEVFNPQRTSQPEEVYYKLCASIMSLSRKYEVAIIDKTCRQCRECKVFSYRKFEAILKHNSLIASEDEPTRCFEAPVPTDHANMRGSNYFK

SEQ ID NO: 248 - protein, 487 aa, synthetic construct
MINYELFSTIRHLKEHEGLSVPQIATELSLDPRTVRKWCAAPFRPRKITSRSSKLDAFKGDIVRMLQSHPYSATQIFQRICEQGFDGGYSIVKRYVRKVRPPKFPAFLKLSFAPGECAQVDWGSYGAVNVGSTRRRLSFFVMVLCYSRMMYVEFTVSQTMEHFLGCHQHAFDFFGSVPKKIMVDNLKSAVLRRIVGHAPVFNPKYLDFSNYYGFSIAPCNVGKGNEKGRVENAVGYVKKNFLSGLTVPDFAALGPAARNWLETICNVRIHGQTRQKPIDLFEREQPFLTPLPVNPFDVATVSQVRASSQFRITMDTNCYSVPAEYAGSRLTLKAYPDRLCVYSKGTLIARHVRSYDRYQDFEDPDHPKELLNERKKARDQKIFMRFLCLSPKAEQYYRKLAQRRMNPHHHVRKIVALSEIYHPDAVARAMEDAFAFEAFSSEYITNLLEQRSRSLPEPGALHLTGREDLLTITVGQPDLSIYDKEAS

SEQ ID NO: 249 - protein, 490 aa, synthetic construct
MIDYELFAKIRHLTENEGLAPAQIARELALDPRTVRKWLATSFRPRNTTHRPSKLDPFKSQVVRMLQNHPYTATQIFQRIREQGFEGGYNIVKRYVRKVRPPKTPAFLTLSFAPGECAQVDWGAYGAVNVGSTRRRLSFFVMVLCYSRMMYVEFTLSQTMEHFLGCHQNALDFFGSVPKKLMVDNLKSAVLKRIVGQEPVFNPKYLDFARHFGFTIAPCNVGKGNEKGRVENAVGYVKKNFLAGLDIPDFAAIAPACRNWLETIANVRVHGQTRQRPLDLFQKEKPFLNPLPDNPFDVASISQIRASSQFRVTLDTNRYSVPAEYASTRLTLKAYPDRVCLYSHGNLIARHARSYDRYQDFEDPDHPKGLLRQRRKARDQKIFLRFLALSPRAQQYYRKLELRRMNPHHHVRKIVALSEIYDPEQVKRAIEDAFVFEAFSSEYITNLLEQRSRFLPQPQALQLTRREDLLRIKLDQPDLTIYERKNHERE

SEQ ID NO: 250 - protein, 620 aa, synthetic construct
MDNQALKSQFFRSISVHLRELQVVAPFFRSIPVHFRRMLSDFPEYIRSAVHGIVSVYLRFRSISVHSFPGFSFLCAGKLTRNSTVMAGTTKDMSLIKQVLQLKQAGESNRGVSRKLPIDKETVNGYVNTVKANGWNISDLLEIDDPELERMFHAGSPAYTDRRMEEFLILLPRYRELLANPKSHVSRQVLFDEYRATHPDGYGKSQFYYHLKQNLVAKKDVTAVLANTYKPGEKLMVDFAGDKLSYVDAETGEIVKVEVFVACMPYSDYTYVVCVPSQKTEDFLYAIRMCLEHLGGVPSILTPDNLKSAVISNDRHEPKLNKALEDMGNYYHFVVLPCDPASPTQKALVEDSVRITYNRVYARLRNRTFHSLLELNRAVWELMERHNQTRMQKRPYSREERFHAMEKELLKPLKPEPYEMRLYADLKVQANCHVELRQDKVTHFYSVPYIHVGKQARVVFTRSWVKVYVEQKLVASHIRSHTYGYTTVREHLASSCRVIMERSAAYYVEKAKDISPDCHEYVKRIFDPKRTAQPEEVYYKLCNSIVSLRRKYDLATFDLTCRQCMEYGIYSYSKFEAILRRNGMNASADETVIFHAPTPSNHGNMRGKDYFTGNDINQQQ

SEQ ID NO: 251 - protein, 532 aa, synthetic construct
MAGTTKDMSLIKQVLQLKQAGESNRGVSRKLPIDKETVNNYVNTVKANGWNIVNLLEIDDPELERMFHAGSPAYTDKRMEEFLSLLPRYRELLADPKSHVNRQILFDEYRATHPDGYGKSQFYYHLKQNLIAKKDIVAVLSNTYKPGEKLMVDFAGDKLSYVDPDTGEIIKVEVFVACMPYSDYTYVICVPSQKTEDFLYAIRMCLEHLGGVPPILTTDNLKSAVISNDRHEPKLNKALEDMGNYYHFVVLPCDPASPTHKALVEDSVRITYNRIYARLRNRTFHSLMELNRAVWELMEKHNQTRMQKRPYSREERFHAMEKELLKPLKQEPYEMRLYADLKVQANCHVELRQDRVTHFYSVPYIHVGKQARVVFTRSWVKVYVEQKLVASHIRNHSYGYTTVREHLASNCRAIMERSAAYYVEKAKDISPDCHEYVKRIFDPKRTTQPEEVYYKLCNSIVSLRRKYDLVIFDLTCRQCMEYGIYSYSKFEAILRRNAMNASADETVIYAPTPTNHGNMRGKSYFTGNDINQ

SEQ ID NO: 252 - protein, 533 aa, synthetic construct
MAGTTKDMSLIKQVLQLKQAGESNRGISRKLPIDKETVNGYVNTVKANGWNISDLLEIDDPELERMFHAGSPAYTDRRMEEFLILLPRYKELLADPKSHVSRQVLFDEYRATHPDGYGKSQFYYHLKQNLVAKKDVTAVLANTYRPGEKLMVDFAGDKLSYVDAATGEIIKVEVFVACLPYSDYTYVICVPSQKTEDFLYAIRMCLEHLGGVPPILTPDNLKSAVISNDRHEPKLNKALEDMGNYYHFVVLPCDPASPTQKALVEDSVRITYNRIYARLRNCIFHSLMELNRAVWKLMERHNRTRMQKRPYSREERFHAKEKELLKPLKPEPYEMRLYADLKVQANCHVELRQDKVTHFYSVPYIHVGKQARVVFTRSWVKAYVEQKLVASHIRSHTYGYTTVREHLASSCRVIMERSAAYYVEKAKDISPDCHEYVKRIFDPKRTTQPEEVYYKLCNSIVSLRRKYDLATFDLTCRQCMEYGIYSYSKFEAILRRNGMNASADETVIFHAPTPSNHGNMRGKSYFTGNDMNK

SEQ ID NO: 253 - protein, 510 aa, synthetic construct
MDILEILRLVRAGESDRTIAQVLGHNRRSVTKYRRWAEAEGLLEGPLPGAGALQAALARSLPAALPPQQRSSLEPYRAEVAALLAQQVEVAAIRARLEERHGHPVSYSAVRRLAARLAPPARPAFVRVEVAPGSEAQVDFGYAGLTRDPATGRPRKSWVFVLVLSWSRHLYAEVVFDQRVETWLLCHEHAFTAWGGVPARIVPDNLKAAVARASFTEPVAQRGYRECAAHYGFLIDPQPPRLPRLKGKVEQGGVHYVCRNFLAGRAADESLPERNRALAQWARQTAGRRVHGTTKQAPLDRFTGVEQPLLAPLPRVPYDLAVWKQVRVYRDCYVQFERSYYSVPFRLVGQAVWVRGGARTVEISDQQHQVVAAHRRADRPGDRLTTLDHLPAEKVPGLVITREDCRLRAAAIGPATARAVEDLLAHRPEDRLRSAGRLLRLAARTSPARLERACARALAYEAADYPTIRRILDEGLDAQPSAPAPPPAPRPYTFARGAAEFVASLMGGGQ

SEQ ID NO: 254 - protein, 488 aa, synthetic construct
MIDYETYSKIRLYHRERGLSFGQIARELGLDPETVAKYVRAASFQRRGGAKRASILDAFKPAINRWLERHPYSATQILQRLRGEEGYTGGFTILKDYMRVVRPVRHPAFLSLAFAPGEAAQVDWGCAGMISLGTTRRRLSFFVMVLCHSRMIYVEFTCGEALEHFLACHQNALEFFGGTPSVILIDNLKTGVLRHLCGEKAVFHPRYLDFAAHYGFEPRACNVRKANEKGRVENGVGYVKKNFLAGLELPNNLSAINTAAGQWMGSIANVRIHGETRKPPQELFLIEKPALRPLPPMAADTSVTRIVRVTNRCRVVLDTNRYSVPSLYASQRLTLMAFADRLCLYHAHNLVATHPRSYERHRDFENPDHVKELLDQRRRARDAKWLLAFYSLSPHAEHYHQQLAARSLNARSHVNKIVALAEIYGPDKVARAIEDAIQSQAYSSQYIDNILQQRERHTPQPGPLHLTRRSDLLEIELSPADLTLYDNP

SEQ ID NO: 255 - protein, 508 aa, synthetic construct
VSGKHITDQQVRLYMEFRRTHTREAAAAKTGLSTTTGARLEADPRFPSQKQTPHGRRRPDPLAAIWDSEIVPMLEAVPGLRPITILGEMLRRHRDLPAGTRRTLERRVRIWQAIHGPERDMIFRQDHPPGKQGLSDFTTGDPLGVTIAGVLLAHRLYHFRLAFSGWQHAEVVLGGESFVALAEGLQNALWALGGAPHEHRSDSLSAAFRNLNREAAEDQTERYEALCSHYRMTPTRNNTGVAHENGSIEASHGHLRAALEQALLLRGSVDFAELALYRRFVAEVVGRANADRRRELEIERPALKSLPPRRTADFEEELVYVTRNGGFLLRRVFYTVPSRLIGHRLRARIYDDRIECLLGGELVLTLRRGRAPQGRAMRGRTIHVVDYRHVIHALRRKPQALLNLVYRDQLFPRVAFRRAWDALLAAGPPRTACRIMVGLLALAHQRGCEAELAAELEALLDAGTLPDLKALEAKFAPASSSLPHVSVALPSAGTYDALLGNDAVEVSS

SEQ ID NO: 256 - protein, 489 aa, synthetic construct
MIDFDLFVRIKNYHEQKGLNAAQIARELELDPRTVAYWLSQKKYRPRNPVQRPSRLDPFKSSILRMLENHPYTAAQILHKIREEGFDGGYTILTDYVRKVRPRRTPAFLKLSFAPGECAQVDWGSHGSIQVGETRRRLSFFVMVLCYSRMMHLEFTVSQTMEHFLACHQNAFAAFGSVPKRIMVDNLKSAVLKRIVGAAPVFNPKYLDFANHFGFTIAPCGVGKGNEKGRVENGVGYVKKNLLAGLDLPDFHAMAPAARQWLDTVANVRIHGETRRKPIEMFQEERASLLPLPPYPYDLGAIAQVRASTQFRVSLDANHYSVPAEYAGSHLTLKTYPDRICIYHGEKLIARHTRSYDRNKDFEDPDHPKELIAQRKKARDQKLFMRFLTLCPKAQDYYLELEKRRMNPRHHVQKIVALSEIYGVGPVARAMEDAFFFQAFSCEYIANLCEQRARRLPEPGALHLTRRSDLLDLEVQQPDLSIYQEDKRD

SEQ ID NO: 257 - protein, 513 aa, synthetic construct
LPGRPATDQQMRMYMEHRCHHPQRIAAARSGVSERTGRRIEGDPRLPSQKAAERPLRRQVADPLGGLWESDILPMLASRPGVRPVTVLEEMQRRHPDRDWDRLRRTLERRVRAWCAEHGAEREVIFRQDHPPGQQGLSDFSDMADLDVRVAGEPLSHRLYHFVLAYSAWEHAEVVLGGESYTALACGLQNALWSLGGAPAEHRSDSLSAAFRNLDQDAAEDQTRRYEALCAHYSMQPTRNNRGVAHENGAIESQHGHLKRAAAQALLLRGSTDFDSLTAYRDWIADLIGRRNARREKLVGLERAQLGKLPPRRTTDHDEATVRVTSSSGFILRRVFYTVPSRLIGYRLNLRIYDDRLECFLGQSLVLTVPRGRAPSDGRRTQVVDYRHIIHSLRCKPMALLHLVYRDALFPRPAYRAAWERLIEARDARTACRTMVGLLALAHDGGCEADLATALAEQLEDGGVPDLAVLRARFAPTATRLPVVAVNLPSIASYDVLLPAMAATASTTTGATP

SEQ ID NO: 258 - protein, 465 aa, synthetic construct
LNLAVPLPQPSDVLEALGPPNKKARAVSTILPFGELVTKWDEDGVEMVAIYRRLVEDHAYGGSYSSVRRFLAKKHRANPEVWVRVETAPGEEVQVDFGYAGIMLDPATGVKRKAWCFVMVMSHSRHMYVEFVFNQTIAMWAGCHIRAFKWFGGVPKRVVIDNLKSAVIKSQLEDPVLSAPYRELALHYGFLIRPCRPRTPRHKGKVESGVHYVKRNFLPAQTFVDINDANRRVAKWVLEYAGLRTHGTTAQQPLERFRAVEKSALSALPVHPFTLEEVREVTVRRDCHVTLCGGYYSAPFTLVGKSLEAHLYPNTVQLYDGIDLVCTHVRAKAKGERITRGEHYPPQKRKFLDHTPDYCRTTAKEVGPYCHELVCGILDVRPADNLRAAQQTIALVEKHTDIRVEAACRRAIYYGDPHYRRVKSILGSGMDADELPEDSPLVTERPVYAHARPISEFFPEVMTVC

SEQ ID NO: 259 - protein, 510 aa, synthetic construct
MERIHMNQMRDLIQRLKMGESERRIAQDMQVSRPTIHKYHELAKQAGYLEKGAGIPNDETLQKVLGPGPKPPKIVSSLEAYGEVVKTLRNQEVEMVAIWQRLKADYHYTGSYSAVRRYVAHLEPAPVEAYVRVHTPAGEEMQVDFGSVGPLYDPASGQIRTAYAFVATLCYSRHQYAELVFDQKVTTWISLHRRAFEYFGGVPRRVVPDNLKAAVLKILVHDVVLGEAYRQMALYYGFLISPNRPYTPRHKGKVENGVHYVQRNFMAGQTFADIGCANQHLKSWIREVAGVREHGTTHEAPLKLFKELEQAALLELPGEPFSLCEIRTAKVHPDCHVVVAGSFYSAPYVYVGQKLDVYVRDRVVELYQGQKLVATHVRCQNPGQWQTRLEHYPENKAAFLQRTPDYCRHLAACLGPATSQVVERLLSDRPLDRLRSVQAILRLEETVGAGRLEAACARAVYYGDVHYRHIKEILNAALDREPLPATILSQPALPHLFARPTSDFFPQVRS

SEQ ID NO: 260 - protein, 516 aa, synthetic construct
MSKIKQVLIMHKQGMSNRDIASEIGINKCTVNDYMRKIRLEPLGIDELLALDDPVLEGRLFAGSPAYTDPRMEEFLKELPYFIDQLKIPHVTRFLLWEEYIRKHPDGYGKSQFFFHLKQNLVVEKTPVGVLTNRYEPGKELFVDFAGDTQSYIEPSTGEVIEVQVFVATLPYTDYAFAFCIESQKVEDFLHCIRMCLEYIGGVPRILVSDNLKSAVIKSDTYEPTLNKALEDMGNHYHFAVLPARSLHPKDKALVESQVSRIYHKVYARLRNRQFYSLQELNEAISQALLAYNQTRMQLRPYSREEHFHSSEKSALQPLPDTIYEMKCYANVTVRETGEVYLSCDKHFYSVPYELTGRKASIIYTRSLVKVYVDNKSVAIIPRDRTPGEHTQIPAHLPPNVRAYLERSPESYCDKARHVSESLEKLFQSMFFNRATGVNFDVYYRSCEKMLSLQKKTASSLFDKACDVCRINHIYRGTGLEDVINAMGKTIADEESERSTVIPSNHENTRGPAEYK

SEQ ID NO: 261 - protein, 524 aa, synthetic construct
MLTTAQINDLHRLYWSDHWPIRKIERHLHMGWETIKKYLDMPAQTPAGRPRSSKLDAYKTTIAELLEKDPSASAAVIGQRLRPLGYTGGGSILRHYLHEVRPQLKPQRAFVRMEPKPGERFEVDWGHFESLHYQGDQRKLYAFALVDGHSRMQYLEFTHSQSFETFVRCHIHAFQKLNGIARELWYDNLATAVAEHDGRLVRFNPRFLAFAREFNFYPRACNPASGWEKGKVERGGIGYVRQNFWPLRDFLDLHDVNRQGREWLDQIANRRLHSETRERPIDRFQPDALRCLPVITPDYRDTVEALVHKDMRLQFDGNRYCVPYRFAGRRLTLKADSSSVTIYDRVTEIVSYARSWRRGQTFGAERFEAELAGFRPAAKRSRAQDRLFSFLDGLCSKAALEAYLRDIADSDRSLSRQITELLELIRQYGPDAVAGAIEKAATARAFGADYVANILRQQQCPRREQPPLRLRDPRLNELVTDPLSLLAYDAFILESEKESDDTPGTETPRSESDGHEPPSGDDPL

SEQ ID NO: 262 - protein, 511 aa, synthetic construct
MNYLHDLINRLRAGDSERRIAREMHLSRPTVHKYKAWAAEQGYLDASQPLPDKGTLQAALGAVTPPPQMVSSLAAYQAVVEQLLEQGVEMTAIWQRLRESYGYQGSYSAVRRFVHRLRPPQGEVFVRVQSAPGEEMQVDFGSAGPLFDPVSGRLRPAHVFVATLSFSRHQYAELVFDQKVPTWLGLHRRAFESFGGVPKRVVPDNLKAAVLKALVHDPVLGEAYRRLGLHYGFMISPTVRATPRHKGKVESGIHYVKRNFLAGQRFVDSQVANQRLQVWVREVAGVRVHGTTRQSPLQLFYEYEQAALQPLPATPFTLLQIKPVTVHPDCHVVIDGSYYSVPYQYLEQTLEAHVSEQVVELYAGLELVVTHLRATQPGQWQTRLEDYPPAKAAYLIQTPAYCRQEAARIGPSTRQVVDHLLAERPLDRLRAVQAIVRLEQSVGPVRLEAACVRALFYGDVRYRRIKDILNAALDREPLPEATPAPTKPARPFAFARPSGDFFASEPEEPPC

SEQ ID NO: 263 - protein, 511 aa, synthetic construct
MNQLHDLINRLRAGESERRIGRDLQLSRPTVHKYRQWGQVQGYLDPAQPLPDSATLQAALGSAAQPPQMISSLAVHQAVVEQLLAQGVELTAIWQRLRDNYGYQGSYSAVRRFVQRLRPVEAEVFVRVQTAPGEELQVDFGSAGQLFDPVSGRARTAYVFVATLSYSRHQYAELVFDQKVPTWLGLHQRAFESFGGVPQRVVPDNLKAAVLKALVYDPVLGEAYRRLALHYGFLISPTVPATPRHKGKVENGIHYVKRNFLAGQQFVDIYVGNDQLGRWIREVAGTRMHGTTRQAPLRLFAEYEQAALQALPATAFTLLQIKPVKVHPDCHVTIDGSYYSAPYRYVEQTLEAHVSQQLVELYAGLELVVSHLRATRPGQWQTRLADYPPAKAAYLIQTPAYCRQQATRLGPATRQVVDQLLADRPLDRLRAVQAILRLQQSVGPVRLEAACARALFFGDVRYRRIKDILNAALDREPLPEPAPVSTQPARAFTFARSSHDFFPPEAEGQPC

SEQ ID NO: 264 - protein, 492 aa, synthetic construct
MRLRTDHPQMTAAAKAGLSVASARRIDLDPRPPSTKKQWRTWRTRPDPLDGVWNEEILPLLVAAPGLRPITLFDEMERRHPDRIGPSFRRTLERRIADWKALHGADRDVIFPQTQQPGRMGLSDFTDANGFGVIVGGQKLEHRLYHFALAFSGFEHAEVILGGESYAALASGLENALRLLGGVPLEHRSDSLSAAFRNLARPDVEDLTRRFAALVAHYGMVPTRNNRGVAHENGAIESRHGHVKTRVVQALLLRGSPMFDDLEAYRAFISGVIGQHNRRHAAMIDAERAVLRPLPVAPAMTWEAMTVRVTSASGFMCHHVFYTVPSRLVGHRLHLRIHDDRIEAYLGGSFVLTLPRARRGKGAGAVHVVDYHHIVAALRAKPGALTHLAYRDALWPRTAYRRAWEALIAAGSARDAARTMVGLLALAHERGVEADLATAIDAGLDAGELPDLAMMLRRFTPVAAAAPEVLVILPPLATFDRLIALAASEVMS

SEQ ID NO: 265 - protein, 444 aa, synthetic construct
MPEISQWPQQLREWHARLRPHFARPEVHQHALLYLHAVLSEIPRKNGWQIAEHARQANPAGMQRLLSRAVWDEDAVRDALRTFVCQTLSPPPLVPACADAEPLYPVLVLDESGFPKRGRHSAGVAPQYCGRTGQVENCQVGVFLSYVTALGHGLIDRELYLPEDWCADLPRRQAVHIPDHLSFATKPELGIHLLQRVQAAGLPIRWVVADTVYGHSTQLREWLHAQNYAYALAVPSIEVVCVQTRTGVLLADVASIAAQALRPSDWQRLSQSQGTKGERLFDWARLPVLQAGSSDGRHWLVVRRCLDDPHELAYYQVFAPPDTPLPTMVRAIGARWRIEEDLQTNKDLGLDQYEVRSFLGWSRHITLVLLAAAFLLSVTVQHTLASSASEPLICFTLSEVRHLLAHLFFPPPTSLLLLAHWSRFRRTHQYWAGYYHRRRRAKAS

SEQ ID NO: 266 - protein, 518 aa, synthetic construct
MLTPEQISEIHRLHFVEKWSQRKIASHLRIGRPAIAKYLAAPAPAVKGRDRASKLDPFKAVIEELLQQDPRANAPVIVQRLQPLGYDGGITIVKDYLRAVRRSSKTRRAYVRVEPAAGERFDIDWGHFGTLIYNGATRKLYGFCLVESHSRKMYLEFTHSQTFETFVRCHIHAFEAMTGIARELWFDNLATVVAEHEGSLVRFNPRFLGFAREYGFIPRACHVAAAWEKGKVERAIGYVRQNFWPLRTFTDLGDVNTQARQWLEEVANKRQHRETGQAPDQRFQPEALRPLPLLLPDYRDTVEALVHKDLRLSFDGNRYCVPPRYVGRKLTVKADASSVTIYDQQQEIVRYARCWERGQTFGAERFQKELFAQMAAAQRSDAQQRLVALLGPESEHYLRRLADTDRVLSRQVRELFTLIREYGPDAVAQALIKAHAAGAFGADYIANILRQQQVRRDIQPRMQLKDRELNELVTDPLSLAEYDAFILRSRKDPHDTTPSETEPTQPDGDEPPTGSSPG

SEQ ID NO: 267 - protein, 515 aa, synthetic construct
MIDYETFCRIKHLHGEDGLNVTQIAQALSLDPRTVHSWLETQRYRPRQGARRGSKLDDYKATVRRLIERHPYSGVQVFQRLKEAGYTGSLTVVKDYLRVVRPPRKPAYLTLAFAPGECAQVDWGQYGTVSVGNTRRRLSFFVMVLCYSRQMYVEFTVSQTMEHFLGCHLRAFEYFGGAVPEKVMVDNLKSAVLRRLTGEAPVFNPRYADFAAQLGFKIVPCNVGAGNEKGRVESGVGYVKKNFLNGLEIPDFSAVNPAARVWLDTIANVRLHGETRERPVDRFAAERASLHPLPSGEPDIGAVYTVRASNRFRVTFEANRYSVPAEYASQQLTLKAYPDRLCVYHREKLVARHRRCYDRRRDIEDPDHPRALLAERRSARAQRQLARFLALSPRAEAYYAELAARRFNAPHHVQKIVALSEIYGTEAVARALEDACHFQAFSNEYIANILESRARVLPQPSALHLTRRHDLLELELPEPDLSLYEPDDEGSREDGDPHDEPSSPPDPETQNDPSQ

SEQ ID NO: 268 - protein, 465 aa, synthetic construct
MKHPHHTTAEPVETTLRAMGRWLMSLKHLHQRLRPHFARPEPHQHALLYLQAVLSEIPRKNGWQIAEHARLSRPSAIQRLLSHATWDEDGVRDELRALVSQMLNPLPAVSEHSASETPFPVLVIDESGFPKRGQHSAGVGPQYCGRTGRVENCQVGVFLSYVTALGHALIDRELYLPEDWCSDLPRRHAAHIPDTVCFRTKPELAQQLVHRAQSARLPIRWVVADTVYGHSPDLRQWLQEQGYAYAMAVPSTEVICVQTPAGVLLSDVGSIAHHQLRRRDWQRLSQSQGTKGERLFDWAILPWMQAGTADGRHFLLIHRCLDDPSELAFSLVFAPLPVPLSTIVQAIGARWRIEEDLQATKDLGLDQYEVRSFLGWYRHVTLVLLACAFLAGISVQQSQEGAPPQTCSPLIPLTTSEVRHLLARLVFPAPTSAPLISQWSWWRRTHQYWAGYYHRRRRQKTGSAW

SEQ ID NO: 269 - protein, 516 aa, synthetic construct
MPGKRKETMDIREMLRRFREGQSNRAIAKEVGVDRKTAARYRDWAEGQGLLAGPLPPLGDLHQLLKETLNSAAPPQNISTVEPYRELVVKLRKSGVEIAAISERLKEQGYRGSYASVYRFVNHLEPRAPNATVRVETRPGEEAQVDFGYAGRMIDAESGELRKTWVFVMTLSWSRHQYVEFVFDQKVETWLRLHRNALSFLGGVPGRIVPDNLKAAIVHQSWGDEPQAQQSYRECAEHYGFLIAPCRPRKPEHKGKVESGVHYVKRNFLAGREATTLEQANRDVGRWVKTTAGQRIHGTVKEKPLQRFKIELRALKPLPISPYDMAVWKRVKLHRDCHVVFNQAYYSAPFRLVGQELWVRGGTQEVQVYTSDYKLVATHTRTHRPGQRVTTVDHLPPEKVPGLVLTRQTCRRQATEIGSATREAVDRLLDHRPEDRLRTAARLLRLGDRFGSGRLEAACTRALRFDDPAYMTIKRILEQGLDAEELSPVAAVPPGKTYVRTTTELVGHLLGGVSWR

SEQ ID NO: 270 - protein, 459 aa, synthetic construct
MKSSQHSTSEASGPGLPEISQWPQQLREWHARLRPHFARPEVHQHALLYLHAVLSEIPRKNGWQIAEHARQANPSGMQRLLSHAVWDEEAVRDALRTFVCQTLSPPPLVPACADAEPLYPVLVLDESGFPKRGRHSAGVAPQYCGRSGQVENCQVGVFLSYVTALGHGLIDRELYLPDDWCADLPRRQAAHIPDHVSFATKPELGIHLLQRVQAAGLPIRWVVADTVYGHSTQLREWLHAQHYAFALAVPSIEVVCVQTRTGVLLADVASIAAQALRPSDWQRLSQSQGTKGERLFDWARLPVLHAGSSDGRHFLVVRRCLDDPATLAYYLVFAPPDTPLPTMVRAIGARWHIEEDLQTNKDLGLDHYEVRSSLGWYRHITLVLLAAAFLLSVTVQHAHTAPACAPLIALTASEVRHLLAHLFFPSPTSLPLLTHWSRWRRTHQYWAGYYHRRRRVKAS

SEQ ID NO: 271 - protein, 488 aa, synthetic construct
MINYELFAKIKHLKEHEGLTAPQIAGELAIDVRTVRKWLDAAFRPKKITPRPSKLDPFKSDIVRMLETHPYTATQIFQRICEESFDGGYSIVKRYVRKVRPPKSPAFLKLSFAPGECAQVDWGSYGAVDVGSTRRKLSFFVMVLCYSRMMYVEFTVSQTMEHFLGCHQNAFDFFGSVPKKIMVDNLKSAVLKRIVGQTPVLNPKYLDFANHYGFSIAPCNIGKGNEKGRVENAVGYVKKNFLAGLNIPDFSAIGPAARNWLDAIANVRIHGETRQKPLHLFEKERPFLNPLPVNPFDIATVSQVRASSQFRITIDTNRYSVPAEYSGTRLTLKTYPDRLCVYSKDKLIARHVRSYDRYQDFEDPDHPKELLNQRKKARDQKIFMRFLALSPKAEQYYRKLEQRRMNPHHHVRKIVALSEIYDPDAVARAMEDAFTFEAFSSEYITNLLEQRSRSLPEPGALHLTRREDLLQIKVGQPDLTIYERKHHE

SEQ ID NO: 272 - protein, 491 aa, synthetic construct
VIDYETFCKIHDCHHRHGLTIAQTARFLGIHRSTVAIWLARARFTPRRSRPRPSKLDPFKPSIMRLLDSHPYSAQQIFQRLREEGYRGGVSILRDYVRRVRPPRPAVYLKLHFAPGECAQVDWGAYGSVAVGNTRRRLSFFVMVLAFSRQMFVEFTVSQTMEHFLACHEHAFRAFGGVPAKVMVDNLKSAVLQRLAGVAPVFNPRYLDFARHHGFAITPCNVARGNEKGRVESGVGYVKKNFLNGLELTEFAAIQAAVQVWLDTVANVRIHGETQQRPIDLLMQERAHLGPLNPHPYDSARTFTSVASSQFRITLDTNHYSVPVSYAHRKLTVKAYPDRICIYFDSQLIARHKRHYDRHRDIEDPEHAKGLIAQRRRASEQRLMTRFLALSADAAAYYDGLEQRRFNARHHVRKILALAEIYSPDLVARAISDGLAFEAFSAEYITNILEARTRALPEPGPLQLTRRHDLLDIDIDPPDLNDYKVNDHDTE

SEQ ID NO: 273 - protein, 523 aa, synthetic construct
MAGKSTNMSRIKQVLQLSGNGVSNRQIAKDLDINKETVNNYVRFFGSDPLSLKEVLKMEDPELEARFRAGNPAYTDYRHQTFLDELPDFKTSLGHKHVTRFLVWQDYIAKHPDGYRKTQFFHHLKQQLAAATPTTVLSDTYVPGEKLFVDFAGDTLEYVNTETGEMIKVQVFVACLPYTDYAFALCIPSQRVEDFLYAISKCMDAIGGVPKILVTDNLKSAVIKADKYEPTLNKALEDMGNHYRFVTIPCRPYSPTHKALVENQVKIIYRRVYAKLRNTVFYSLEDLNEAVWQKMLEHNQTRMQQRPYSREEQFFAVEKNALSPLPEQPYQMKFTCDLQVRNDGFVYLARDKHYYSVPFVHIGKRSHVIYTRTLVKIFVNNEVVATHERHLGFGHTHKNEHLASNSNAILSRSPEYYQEKADKHSAVFKQLVSDMFLDLEQRQIPPEFKYKTCDFMLSIGRKTPMADFEQACQIAIQNRSYSGKFLQNVISNLNVAKSQSESKERINPQPTNHENMRGNSYYK

SEQ ID NO: 274 - protein, 515 aa, synthetic construct
MERFFIAMRNRTLPGRHVTDCQMRLYMTIRQTQPPIIAAAKAGFSTATAYRIENDRRLPSQKKLPRGRRRQDPLAAVWDNEVVPLLKSTPGLRPVAIFDEIRRRHPEIGAGIRRTLERRIRTWRALHGAEREIIFRQEHPPGRLGLSDFTDMRDRGVSIAGVLLDHRLYHFRLAFSGWEHAHVVLGGESFVALAEGLQNALWALGRVPRQHRSDSLSAAFRNLDDDTRHDQTRRYGALCAHYGMEPTRNNRGVAHENGSIESPHGHLKQAIEDALLLRGSRDFDTLDAYRRFIDEIVGRRNARLAKRLALERSALQSLPMRRTADYEETIVTVTSTSGFTLKKVFYSVPSRLIGHRLRVRLYDDRLECFLGATPLMTLRRGRPHPSGKHGHVIDYRHVIHALRRKPMALLNLVYREQLFPRRAYQRAFEALLPAEGEKRACRTVVGLLALAHERACEAELADIIDAELDAGRLPDLDLLARRFAPDPAAIPDITVELAPLHLYDELGTVRLGDAA

SEQ ID NO: 275 - protein, 513 aa, synthetic construct
MERIHMREIVDIINRLRNGESERAISDDLGNSRVTVNRYHRLAEEQGFLNLAVPLPQPSDVLEALGPPNKKARAVSTILPFGELVTKWDEDGVEMVAIYRRLVEDHAYGGSYSSVRRFLAKKHRANPEVWVRVETAPGEEVQVDFGYAGIMLDPATGVKRKAWCFVMVMSHSRHMYVEFVFNQTIAMWAGCHIRAFKWFGGVPKRVVIDNLKSAVIKSQLEDPVLSAPYRELALHYGFLIRPCRPRTPRHKGKVESGVHYVKRNFLPAQTFVDINDANRRVAKWVLEYAGLRTHGTTAQQPLERFRAVEKSALSALPVHPFTLEEVREVTVRRDCHVTLCGGYYSAPFTLVGKSLEAHLYPNTVQLYDGIDLVCTHVRAKAKGERITRGEHYPPQKRKFLDHTPDYCRTTAKEVGPYCHELVCGILDVRPADNLRAAQQTIALVEKHTDIRVEAACRRAIYYGDPHYRRVKSILGSGMDADELPEDSPLVTERPVYAHARPISEFFPEVMTVC

SEQ ID NO: 276 - protein, 515 aa, synthetic construct
MERFFIAMRNRTLPGRHVTDCQMRLYMTIRQTQPPIIAAAKAGFSTATAYRIENDRRLPSQKKMPRGRRRQDPLAAVWDSEVVPLLKSTPSLRPVAIFDEIRRRHPEIGAGIRRTLERRIRTWRALHGAEREIIFRQEHPPGRLGLSDFTDMHDRGVSIAGVPLDHRLYHFRLAFSGWEHAHVVLGGESFVALAEGLQNALWALGRAPRQHRSDSLSAAFRNLDDDTRHDQTRRYEALCVHYGMEPTRNNRGVAHENGSIESPHGHLKQAIEDALLLRGSRDFDTLDAYRRFIDEIVGRRNARLAKRLALERSALQSLPMRRTADYEETIVTVTSTSGFTLKKVFYSVPSRLIGHRLRVRLYDDRLECFLGATPLMTLRRGRPHRSGKHGHVIDYRHVIHALRRKPMALLNLVYREQLFPRRAYQRAFEALLPAEGEKRACRTVVGLLALAHERACEAELADIIDAELDAGRLPDLDLLARRFAPDPAAIPDITVELAPLHLYDELGTVRLGDAA

SEQ ID NO: 277 - protein, 488 aa, synthetic construct
MIDRRLVFEIHRLSHEGYKIRKIARTLRIGRGSVKRYLNNPNPPRPVVVRTSKLDPFKEEIQRLLEQDPSVSGAVLLQRLRPQGYTGGRSILGEYLQQVRSKKKRAYIRFESPPGEQFQIDWGHFGSLVYGKTPRKLYCLAVIEAHSRMLYGEFTHSQKQESLHQGLLNAFRFFHGTPREIVTDNMLTAVLEREGSLIRYNEAFLEFLRPFRIVPRACHPYQPHEKGKIEKGGIHYIRHNFWPLRSFTDLLDLNRQFRHWLDTQANGRLHSTTGDRPVDRFKPDALQSLPEFVPDCRETLSLKVHSDFAIRFDSNFYSVPPWAIGKTVIVKADSQTVTLYLHDKTLATHTRCWEKKQRLELPAHREAAFKRRPQEWLAVEVSSFISLGEEAKAFLEGLALTGQPLKKNLIKLLALKDRFGTPLLIQALQRAMIHKAFGAHYVENILHQEKTPKKNHPPVQLQRPDLNRIRLEEPLLADYDAYILKRKD

SEQ ID NO: 278 - protein, 491 aa, synthetic construct
VIDYETFCKIHDCHHRHGLTIAQTARFLGIHRSTVAIWLARARFTPRRSRPRPSKLDPFKPSIMRLLDSHPYSAQQIFQRLREEGYRGGVSILRDYVRRVRPPRPAVYLKLHFAPGECAQVDWGAYGSVAVGNTRRRLSFFVMVLAFSRQMFVEFTVSQTMEHFLACHEHAFRAFGGVPAKVMVDNLKSAVLQRLAGVAPVFNPRYLDFARHHGFAITPCNVARGNEKGRVESGVGYVKKNFLNGLELTEFAAIQAAVQVWLDTVANVRIHGETQQRPIDLLMQERAHLGPLNPHPYDSARTFTSVASSQFRVTLDTNHYSVPVSYAHRKLTVKAYPDRICIYFDSQLIARHKRHYDRHRDIEDPEHAKGLIAQRRRASEQRLMTRFLALSADAAAYYDGLEQRRFNARHHVRKILALAEIYSPDLVARAISDGLAFEAFSAEYITNILEVRTRALPEPGPLQLTRRHDLLDIDIDPPDLNDYKVNDHDTE

SEQ ID NO: 279 - protein, 488 aa, synthetic construct
MIDYELFSKIRHLKEHKGLTAPQIAAELALDPRTVRRWLAVKFRPKKITPRTSKLDPFKRNIIRMLETHPYTATQIFQRICEQGFDGGYSIVKRYVRKVRPPKSPAFLKLSFAPGECAQVDWGSYGTVNVGSTRRRLSFFVMVLCYSRMMYVEFTVSQTMEHFLGCHQNAFDFFGSVPKEIMVDNLKSAVLRRIVGQDPVLNPKYFDLANHYGFSITPCNVGKGNEKGRVENGVGYVKKNFLAGLHIPDFSAIGPAARNWIDTIANVRIHGETRQKPFDLFEKERPFLNSLPANPFDIATVSQVRASSQFRITIDTNHYSVPAEYAGIRLTLKTYPERLCVYCKDKLISRHARSYDRYQDFEDPDHPKELLNQRKKARDQKIFMRFLSLSPKAEQYYRKLEQRRMNPHHHVRKIVALSEIYDPDIVARAMEDAFTFEAFSSEYIANLIEQRSHSLPEPGALYLTRREDLLDIKVEQPDIAIYERSHHE

SEQ ID NO: 280 - protein, 499 aa, synthetic construct
MSGTHITDRQVHLYMTKRKDHTQEVAAAKAGMSVRTARRVAKATKLPSQKPERDWRTRANPFADVWDSEIVPLLRCSPKLKAITLLRKLQEDHADRFPESMRRTLERHISQWRALEGPDKEVFFPQTYQPGVRGLSDFTHMEKLGVTIAGVAFKHMLYHFVLAFSRWEYASVVDGGESFQALAAGLQNALWQAGGCPSEHRSDSLSAAFKNLQEKDDFTVRYAALLEHYGMEGTRNNRGLGHENGSVESSHRYLKDAVDQALELRGHRDFDDRPAYEEFVRSVVMRRNRRNAAAFQVERGYLKELPEHRTTDFVEEEGRVTRSGTFTVDGSIYSAPSRLIGHRLKVRLYSDRLDCYLAGALVHSTARVWRTSKGRGRAIDYRHFIESLKRKPQAFRGLVFRNDLFPREAYRRTWERLDQALSPRNACKVIVGLLELAGNHGVEAELAQRLEALLERGELPDLEMLFAQFAPRQAECPVVFVDLPDASIYDALLHEEVLA

SEQ ID NO: 281 - protein, 491 aa, synthetic construct
VIDYETFCKIHDCHHRHGLTIAQTARFLGIHRSTVAIWLARARFTPRRSRPRPSKLDPFKPSIMRLLDSHPYSAQQIFQRLREEGYRGGVSILRDYVRRVRPPRPAVYLKLHFAPGECAQVDWGAYGSVAVGNTRRRLSFFVMVLAFSRQMFVEFTVSQTMEHFLACHEHAFRAFGGVPAKVMVDNLKSAVLQRLAGVAPVFNPRYLDFARHHGFAITPCNVARGNEKGRVESGVGYVKKNFLNGLELTEFAAIQAAVQVWLDTVANVRIHGETQQRPIDLLMQERAHLGPLNPHPYDSARTFTSVASSQFRITLDTNHYSVPVSYAHRKLTVKAYPDRICIYFDSQLIARHKRHYDRHRDIEDPEHAKGLIAQRRRASEQRLMTRFLALSADAAAYYDGLEQRRFNARHHVRKILALAEIYSPDLVARAISDGLAFEAFSAEYITNILEVRTRALPEPGPLQLTRRHDLLDIDIDPPDLNDYKVNDHDTE

SEQ ID NO: 282 - protein, 510 aa, synthetic construct
MERIHMNQMRDLIQRLKMGESERRIAQDMQVSRPTIHKYHELAKQAGYLEKGAGMPKDETLQSVLGPGPKPPKNVSSLEPYGEVVKTLRKQEVEMVAIWQRLKEDYGYIGSYSAVRRYVAHLEPAPVAAYVRVHTPAGEEMQVDFGSVGPLYDPASGQIRTAYAFVATLGYSRHQYAELVFDQKVTTWISLHRRAFEYFGGVPRRVVPDNLKAAVLKVLVHDAVLGEAYRQMALYYGFLISPTRPYTPRHKGKVENGVHYVQRNFMAGQTFADILCANQHLKIWIREVAGVREHGTTHEAPLKLFKELEQAALLELPAEPFSLCEIRSAKVHPDCHVVVSGSFYSAPYVYVGQKLDVYVRDRVVELYQGQKLVATHVRCQKPGQWQTRLEHYPENKAAFLQRTPDYCRQLAACLGPSASKVVDTLLSDRPLDRLRSVQAILRLEETVGAVRLEAACARAVYYGDLHYRRIKEILNAALDREPLPTTILSQPALPHLFARPTSDFFPQVRS

SEQ ID NO: 283 - protein, 491 aa, synthetic construct
VIDYETFCKIHDCHHRHGLTIAQTARFLGIHRSTVAIWLARARFTPRRSRPRPSKLDPFKPSIMRLLDSHPYSAQQIFQRLREEGYRGGVSILRDYVRRVRPPRPAVYLKLHFAPGECAQVDWGAYGSVAVGNTRRRLSFFVMVLAFSRQMFVEFTVSQTMEHFLACHEHAFRAFGGVPAKVMVDNLKSAVLQRLAGVAPVFNPRYLDFARHHGFAITPCNVARGNEKGRVESGVGYVKKNFLNGLELTEFAAIQAAVQVWLDTVANVRIHGETQQRPIDLLMQERAHLGPLNPHPYDSARTFTSVASSQFRVTLDTNHYSVPVSYAHRKLTVKAYPDRICIYFDSQLIARHKRHYDRHRDIEDPEHAKGLIAQRRRASEQRLMTRFLALSADAAAYYDGLEQRRFNARHHVRKILALAEIYSPDLVARAISDGLAFEAFSAEYITNILEARTRALPEPGPLQLTRRHDLLDIDIDPPDLNDYKVNDHDTE

SEQ ID NO: 284 - protein, 515 aa, synthetic construct
MERLNLNSISDIVYRLRRGQSERAIAKDLGHSRNTVRHYHNLAREKGYLDLHRGVPEPDELLRELGPAPSAPVIVSTVEPYRTVVEELLKSNVEMATIHSRLVREHGYRGSYSSVKRFVHRLRPKTPDVCLRIETPPGREAQVDFGGVGKIRDRATGKLRQAYCFVMTLSYSRHQYAELVFDQKMQTWIGCHRRAFEFFGGVPEEIVIDNLKAAVLKADLDNPTLSVPYTRLARHYGFLVHPCRVRTPEHKGKVENGVRYVQRSFIAGREFVDIEQANRMLLEWVINEAGVRDHGTTHEAPLKRFAEIESSAMMELPAEPFELVRVAQCTVGRDTFIALDGSYYQAPYKLVGRKLDVYVYECTVQIYDGVELLVTYERASRKGQRLTRDEFYPPEKSVYLTRPRAQCSYLASLVGPRCRELVDGLLSERPLDKLRSVHGVLRLGEKYGSTRLERACARAIHYGDPSYVRVKKILEAGLDREEIDSYPAQMSLPVYEHARSAEEFFGELAVEVGRC

SEQ ID NO: 285 - protein, 496 aa, synthetic construct
MVMDPKTIEAIYRMNHEQKLSLREISRQLHTCRRTIKKYLDNPLPKPAIRKPRPSKLDLFKPVIRELLDQWPRASSVVIAQRIRPLGYDGGRSILQEYVATLRRTQSPPRAFVRVESSPGDRFEIDWGHFGALDYQGDRRKLYAFCCIECHSRRLYIEFTHSQCFETFVRCHIHAFQFMTGRPRECLYDNLATAVAEHDGRIVRFNPRFLAFAQEMGFYPRACNKAAGWEKGKIERGGVGYLRQNFWPLRTFTDLADVNSQVRKWLEEIANKRIHSETRQTPDERFRPECLRPLPPLIPDYCDTAIALVHKDIRLCFDGNRYCVPPRYVGCRLTVKADSQSIAIFDHSHEVARYVRCWRRGQTFGAERFEKELLERRVSADRSAAHRRLAMILGEIGESYLRGLAETDRSLTRQINELLILVREYGPESVMAAIRKAQSVGAFGADYIANILMQEQSAREMQPLLLLKDPRLNSLATDPLSLLDYDALILNSRSES

SEQ ID NO: 286 - protein, 409 aa, synthetic construct
DRGYGGSYSSVRRYVHRQHPPQPQAVVRVHTAPGEEAQVDFGSVGQLYDPASGRLRTAYVFVATLSYSRHQYAELVFDQKVPTWIGLHRRAFESWGGVPKRIVPDNLKAAVLHALVYDTVLGEAYRRMAQHYGFVISPTRPHAPQHKGKVENGIHYVQRNFMAGQAFADIHVANHRLALWVRERAGTREHGTTHQAPLHLFSTQEQAALLPLPAEPFTLCEIKPVKVHEDCHVVIAGSYYSVPYRYLGQTLEAHVGERVVQLFREQELVATHGRSQEPGQWHTRLEHYPPDKAAYLERTPERCRQIAARLGPATRQVVEALLAERPLDRLRSVQAILRLEETVGGQRLEAACARALHFADPRYRRIKQILNAAMDREPLPEMPAPVATHTFAFTRSPAEFFPAAEEVQA

SEQ ID NO: 287 - protein, 513 aa, synthetic construct
MERLHMNRLRDLMSRLRSGESERRIARDLGISRTTVRKYRELAEPHGYLQPEQALPDDAALMATLGPGPHPPLLASTVEPYQEVVQRLVDQGVEMTAMFQRLRDNYGYTGSYSAVRRYVHRVYPHIPEAVVRVHTAPGEEMQVDFGSVGQLYDPVQGRLRPAYVFVATLCFSRHQYAELVLDQKTPTWIALHRRAFESFGGVPQRVVPDNLKPAVLQALVHDPVLAEAYRRMGLHYGFLISPTEPGRPQHKGKVENGVHYVQRNFMAGQDFVDILVGNQHLKVWVMDVAGTRLHGTTHQAPLQLFNEYERAALLPLPAEPFTLCEVKSVKVHPDCHVTFAGSYYSVPYRYIGQTLEAYVGERVVEIYQGTTLVATHVRCAQPGHWQTRLEDYPPSKAEYLRRTPDYCRQIAARIGPSTHFVIETLLNERPLDRLRAAQAILRLAETVGRPRLEAACARAAYYGDIRYRRIKDILNAALDREPLPDAVPATSQPAFAFARSGAEFFAPVQEVMA

SEQ ID NO: 288 - protein, 488 aa, synthetic construct
VIDYETFCKIRDCRERQHLTVAQTARALHLHPRTVTKWSARSHFEPRRRVSRGSLLDPFKPRITRLLDTYPYSAVQIFQRLREEGYGGGMTILRDYVRRIRPPKRPVYLKLNFSAGECAQVDWGSFGSVAVRNTRRRLSFFVMVLAYSRRMFAEFTVSQTMEHFLACHEHAFAELGIPSKLMVDNLKSAVLQRLAGVAPVFNPRYLDFARHHGFEIVACNVGRGNEKGRVESGVGYVKKNFLRGLELSDFSAIQAAAQVWLDTVANVRIHGETQRRPIDLFAEERPHLRRPNPHPYDLARTSTTIASSQFRITLDTNYYSVPSSYAHRRLTVKAYPDRVCIYFDNQLIARHPRRYGRHEDIEDPDHAKGLIAQRHRAREQRLMMHFLALSPDAAAYYEGLEQRRFNARHHVRKILALADIYPADAVARAISDGLAFEAFSAEYITNILEVRARTLPEPGPLQLTRGHDLLDIDIAPPDLNAYEIDDDE

SEQ ID NO: 289 - protein, 488 aa, synthetic construct
MIDRRTVFEIHRLFHEGYGIRKIARTLKLSRDSVKRYLDNPNPAKPLIVRASKLDPFKEEIQALLERDPTASGTVLYQRLLPQGYAGGISILRDYLQEIRPKKKRAYLRFESAPGEQFQIDWGHFGALLYGKTPRKLYCLAVIEAHSRMLYGEFTHSQKQEALHQALLNAFLFFEGTCRELVTDNMATAVTEREGSLIRFNEAFLEFLRPFRIVPRACHPYQPQEKGKIEKGGIHYIRYNFWPLRSFVDLVDLNQQFRHWLDTQANTRIHSTTGERPLDRFKPEALQPLPDFLPDCRETLSLKVHSDFAVRFDGNGYSVPPWAIGKTVIVKADTQTVTVVLREKVLATHTRCWEKKQRIELPAHREAAWKRRPQEWLAVEVSRFISFGEEAKTFLEGLAQTGQPIKKNLAKLLALHDQYGTPDLIQALKRANAHRAYGASYVENILHQGKNPKKIHPPVQLKREDLNRIRLEEPLLAEYDAYILKRKE

SEQ ID NO: 290 - protein, 496 aa, synthetic construct
MIDYELFCQIKQQQAKGLKATQIASALGLDERTTRKWMAVERYRPRQSAPRASKLDAFRDRIGAWLERHPFTAAQIFQKLRQEGYDGGVTIVKDYVRRVRPPRPPAFLSLSFAPGECAQVDWGQYGTIAAGSTRRRLSFFVLTMGFSRLMYVTFTLAEKMEQWLACHVRAFEFLGGVPRRVMIDNLRSAVLCHPPGATACFHPRYRELAAHFGFEPVACPLGQAHHKGRVERSVGYIKHNLLDGLEIIGRPALELEARRWLEEVANQRLHRDTRRKPIELFTAEEKPALLPLPLASFDTSVTLPVRASRQFRVEYDGNRYSVPSEYAGQVLTLKAYADRLLFYHQHNLIAEHPRSYDRAQDVSNPDHERTLLVERRRARSQQIYRRFLLLTPKADAFYAQLAQRRLNPLVHLRKIVALVDVYGPAPVGQAIEDALHFQAFSSEYILNILQQRGRQQPTPGPLHLPHKQELLDLDLPEPDCSLYDRDSTPNPETHHE

SEQ ID NO: 291 - protein, 489 aa, synthetic construct
MIDYELFCKIRHLKEHEGLTAHQIAGELAMDPRTVVKWLARERFCQRKASVRASKLDPFKNQITRMLQAHAFTAAQILQRLREQGFAGGYSIVKDYVRSIRPPKSPAYLTLAFAPGECAQVDWGSYGSVTVGNTRRRLSFFVMVLCYSRMLYCEFTVSQSMEHFLCCHKNAFDFFGCVPKKIMVDNLKSAVLRRIVGRPPVFNPKYLDFANHCGFTIAACNVGRGNEKGRVENAVGYVKKNFLAGLEIPDFAAIAPAARNWLETVANVRIHGETRKKPVELFEAERPCLLPLPINDFDIASVSPQRASSQFRITLDTNRYSVPAEYAGRALTVKTDPERICVYANDKLIARHIRSYARYQDFEDPDHPKALLAQRKKARDQKIFMRFISLSPKADLYYRKLEERRLNPREHVRKIVALSEIYGQEPVARAIEDAFVFEAFSCEYIANLLQQRARFHKEPAALHLTRREDLLDIRLEHPDLSVYERMSDD

SEQ ID NO: 292 - protein, 490 aa, synthetic construct
MIDYALFSKIRHLNQHDGLTAQQIARELAMDVRTVKKWLDQTRFRPRQSSPRASKLDPFKSDIVRLLQAHPYTAIQLLQRLREKGFEGGYSIVKEYVRKVRPPKTRAFLTLKFAPGECAQVDWGSFGAVNVGSTRRRLSFFVMVLCYSRLMYVEFTVSQTMEHFLGCHQNAFECFGSVPKKIMVDNLKSAVLKRIVGQAPVFNPKYLDFANHYGFTIAACNVGKGNEKGRVENGVGYVKKNLLAGLDIPDFATIGPAARHWLDTIANVRIHGETRQQPVARFEKERPYLNTLPGHRFDIATVSQVRASRQFRVVVDTNRYSVPAEYAGKALTLKTYPDRICLYCDNKLIARHARSYDRHQNIEDPDHPKQLLLWRKKAREQNIVMRFLALSPKAGQYYQKLEQRRMNPFHHIQKIVALSEIYNPEGVARALEDAFTFQAFSCEYIANLLEQRNRRLPAPGALHLTRREDLLDLTVESPDLSIYHKEKEKP

SEQ ID NO: 293 - protein, 489 aa, synthetic construct
MIDYETYVRIRNYFTNDGLKYSQIADELGLDCRTVAKWANEARYLPRRSAKRVSKLDPFKNEIVRMLEKHPYTARQIFQRLQEGGFDGGITILTDYVRKIRPPKGRPYLKLVFAPGECAQVDWGTYGNVRVGSTSRRLSFFIMVLCHSRMMYVEFTVSQTMEHFLGCHQNAFHFFGSVPQKIIVDNLKSAVLKRTIGKDPVFNPRYMDFANHYGFKIVPCNVGKGNEKGIVENAVGYVKKNLLNGLAITDFKIMKPLVQHWLDTVANVRNHGETGKRPVDMFTEEKPSLQPLPVEPYDIGVVKQARASRQFRVTIDTNRYSVPAQLAGVGLTLKLYPDRLCFYHDDKLVARHVRSYDRRQDYEHPDHPKLLLAQRKKARDQKIFMRFLSLSNNAQEYYRQMEQRRMNPFHHIRQIVALSEIYPPEQVSRAIEDAFHFKAFSCDYIANLLEQRSRQAKEPGALHLTRNSDLLDLTINKPDLSIYNIGGEK

SEQ ID NO: 294 - protein, 489 aa, synthetic construct
MIDYETYVRIRNYFSNDGLKYSQIADELGLDCRTVAKWANEERYLPRRSAKRASKLDPFKNEIVRMLEKHPYTARQIFQRLQEGGFDGGITILTDYVRKIRPPKVTPYLKLTFAPGECGQVDWGTYGNVRVGSTSRRLSFFIMVLCHSRMMYVEFTVSQTMEHFLGCHQNAFHFFGSVPQKIMVDNLKSAVLKRTIGKDPVFNPRYMDFANHYGFKIVPCNVGKGNEKGIVENAVGYVKKNLLNGLAITDFKIMKPLVQHWLYTVANVRKHGETGKRPIDMFTEEKPSLQSLPVEPYDIGVVKQARASRQFRVTIDTNRYSVPAQLAGVGLTLKLYPDRLCFYHENKLVARHVRSYDRRQDYEHPDHPKVLLAQRKKARDQKIFMRFLSLSNKAQDYYRQMEQRRMNPFHHIRQIVALSEIYPPEQVTRAIEDAFHFKAFSCDYIANLLEQRSRQVKEPGALHLTRSSDLLDLTINKPDLSIYDIGGEK

SEQ ID NO: 295 - protein, 490 aa, synthetic construct
MIDYETYVQIRSYFTRDGLTYSQIADELGLDPRTVARWANEKRYLPRRTALRESKLDPYKNRIVQMLEKHAYTGRQIFQRIQEDGFDGGITIVTDYVRKVRPPRTKPYLKLFFAPGECAQVDWGSYGTVRVGSTRRRLSFFVMVLCHSRMMYIEFTVSQTMEHFLGCHQNAFHFFGSVPQKIMVDNLKSAVLKRTIGKAPVFNPRYMDFAGHYEFTIVPCNVGKGNEKGQVENGVGYIKKNLLNGLDISDFKIMEPVAKNWLDTIANVRTHGETGKRPVDMFREEKQSLQPLPTEPYDIGVVKQVRASRQFRVTIDTNRYSVPAQLAGVGLTVKMYPDRLCFYHENKLVARHVRSYDRRRDFEHPDHPKVLLAQRRKARDQKIFMRFLTLSDKAQEYYRQLTQRRMNPFHHIRQIVALSEIYSTEAVRLAIEDAFSFAAFSCDYIANLLEQRSHPQKEPGALHLTRSSDLLDLTIQKPDLSIYSMGGKNE

SEQ ID NO: 296 - protein, 525 aa, synthetic construct
MAQFLQAEDCLEEKIMERLHMNHLRDLIRRLRAGESERRIARDMRISRPTVHKYHELANQQGYLEKDTVIPDDETLQKVLGPGPKPPKIVSSLESYGEVVKTLRKQEVEMVAIWQRLRDNYGYTGSYSAVRRYVAHLEPEPVEAYSRVHTPAGEELQVDFGTVGQLFDPASGRLRTAYAFVATLCYSRHQYAELVFDQKVITWIGLHRRALEYFGGVPRRVVPDNLKAAVVKALVHDAILGEAYRQMALHYGFMISPTRPYTPRHKGKVENGVHYVQRNFMAGQEFADIHCANRHLKDWIRDVAGVRDHGTTHQAPLSLFKECEQAALLGLPTEPFSLCEIRTAKVHPDCHVVVSGSFYSAPYTYVGQKLDIYVRDRVVELYQGQKLVATHVRCQKPGQWQTRLEHYPEHKAAYLQRTPDFCRQIAARVGPAASTVVATLLSDRPLDRLRSVQAILKLEDTVGAQRLEDACARAIYYGDLRYRRIKEILNAALDREPLPDTPVSQPANSHTFARPTTDFFPVVLL

SEQ ID NO: 297 - protein, 519 aa, synthetic construct
MPGRRKTTMDIRELLLHLRAKPSDRAVQRATGMHRQTVRHYRDWAQAHDLLAEPLPPLAELAQLVQATLAEKAPPQNTSSVAPYRELVRQLRREGVEMTAIKARLAEQGFQGSYSAVRRFVHTLEPSPPPEVMVRVERKAGQEAQVDFGYAGLLLDPATGQLRRAWAFVMTLSWSRHMYVEFVFDQTVATWLLCHRHAFEFFGGVPDEVVLDNLRAAILQANVDDPLVQQAYRECAEHYGFLITPCRPATPQHKGKVENGVRYLKRNFLAGRQPTTHTQANQDVRIWCNTTAGLRLHGTTKEQPLVRFQEVERTKLKPLPETPYDLAIWAEVTVAHDGHVTFDNSYYSVPPTQVAGTRLRVRGGARSVALYDLNHQWVTTHDRASQAGQRLTHPEHLPPEKVQGLLLDREHCRAAAHDIGPATGQIVGNLLDDPVLNRLRTAGRLLKLRESYGDQRLEAACVKALHYDEPVYTTVKRILAGNLETVPTSVAPMTLQPARTFVRTASELLDHLFRGTAWT

SEQ ID NO: 298 - protein, 510 aa, synthetic construct
MKRKHMNHIQDIIRRLQLGEGERRIARDMNISRGTVRKYHEIAKQGNYLEKLGDLPSDSVLREVLGPGVQVPRQISTVEPYREKIQEWRKQGVEMTAIWLRLQENYGYKGGYSSIRRFVHRLEPIEPEVFIRVHSEPGEDMQVDFGTVGQLYDPVAKRLRTAYVFVATLGYSRHQYAELVFDQKIATWIALHKRTFEYFGGVPRRVIPDNLKAAVLQAVAHDPILGEAYRRMALHYGFLISPTIPFTPRHKGKVESGVHYVKRNFYAGQEFMDIQIANVHLRDWILNTAGVRKHGTTSEAPLHLFHETEKTCLQPLPMQPFKLLDIHLVKVHPDCHVVIGKSFYSVPFGYVGQELAAHVSENFVEIYHELDLVTTHPRSTQPGQWQTRVEDYPPAKAAYLIRTPLYCKKLAAKIGPATQSVVEQLLADRPLDRLRSVQAILRLEESVGSKRLEAACARAAHFGDVRYRQIKLILNAALDREPLPQSQLAKPAATSHTFARSGEEFFGVSL

SEQ ID NO: 299 - protein, 495 aa, synthetic construct
MALTPEQVNTIQQLRVGQKWSVRKIARHLHVCRKTIRRYLASPLPLPATRCRASKLDSFKEVIAELFAQDPSASAVVIAQRLQPLGYSGELTILRDYLRSWRRRQQPQRAYVRVESSPGDYFQVDWGHFGALDYQGDKRKLYAFCLVECHSRRLYLEFTHSQSFETFLRCHQHAFRFMGGVARQILFDNLVTAVAEHDGSIVRFNPRFLSFAREYDFYPRACHVAAPWEKGKVERAGIGYVRQNFWPLRQFPDLADVNRQARGWLHEVANQRLHRETRQPPDERFRPECLRPLPALESDYRDLAQPLVHHDLRLNFDGNRYCVPPRFVSCHLTVKADSYALTIYDQQRELVSYPRCWRRGQTLGADRFEKELLEQRPSASRSQAQQRLIALLGLPAETYLRQLAETDRPLSRQIAELLELVRQYGPAVVASALAQAQAVSAFGADYIANILHQQQSPRQLQPPLQLKDPQLNELATDPLSLLDYDALILTQRREP

SEQ ID NO: 300 - protein, 496 aa, synthetic construct
MVMHPKTIEAIYRMSHEQKLSVRQISVQLHVSRKAVRKYLDCPLPKPIARKPRNSKLDPFKPVIRELLDQCPRASSVVIAQRIRPLGYAGGRSILQEYVGIVRRTLKPARAYVRVESSPGDCFQIDWGHFGVLDYQGDKRKLYAFCCIECHSRRLYVEFTHSQCFETFVRCHIHAFQFMGGQARECLYDNLATAVSEHDGRIVRFNPRFLAFAREMDFYPRACNKGAGWEKGKVECGGVRYLRNNFWPLRTFTDLADVNSQARQWLQEIANKHPHSETRQTPDERFRPDCLRPLPPLMPDYRDTDIARVHKDIRLRFDSNRYCVHPRYVGFHLTIRADSQSVAIYDHGHEVAGYVRCWRRGQTLGAERFEKEMLEHRPAAERSAAQRRLVMLLGEAGDSYLRGLAETDRSISRQISELLALARQYGSESVIAAISKAQSVGAFGADYIANILVQEQSAREMQPLLILKDRRLNELATDPLSLLHYDALILTQRSES

SEQ ID NO: 301 - protein, 490 aa, synthetic construct
MIDYELFCKIRHLKEQEGLNAHQIAGELAMDPRTVAKWLTRERFCPRKASPRSSKIDPFKNEIARMLQTHAFTAAQVLVRIRGQGFAGGYSIVKDYVRSIRPPKSPAYLTLAFAPGECAQVDWGCYGSVAVGNTRRRLSFFVMVLCYSRMLYCEFTVSQSMEHFLACHKNAFDFFGCAPKKIMVDNLKSAVLRRILGRAPVFNPKYLDFANHCGFTIAACNVGRGNEKGRVENAVGYVKKNFLAGLEIPDFAAIAPAARNWLETVANVRIHGETRKKPVELFEAERPCLLPLPINDFDIATVCPQRASSQFRITLDTNRYSVPAEYAGRSLTVKTDPERICVYASEKLIARHIRSYERYQDFEDPDHPKALLAQRKKARDQKIFMRFISLSPKADLYYRKLQERRLNPREHVRKIVALSEIYGHEPIARAIEDAFVFEAFSCEYIANLLQQRARFHKEPAALHLTRREDLLDITLEHPDLSIYDERNTDV

SEQ ID NO: 302 - protein, 545 aa, synthetic construct
MPLVSPAGLPYNGPMLNTDRINEIHRLFHGEHWSARKIAHHLHIARKTLRKYIQSPVQTPAHRQRTSKIDPFKSTVADLLEQDPTASAVVILQRLRPLGYDGGITVLRNYARKLRGPMHPPRAFVRMEPGPAERFEVDWGHFGTLDYAGDKRNLYAFFLVEAHSRMLYVEFTHSQSFETFVRCHLHAFDALQGVARECWYDNLLTVVAEHVGTLVRFNPRFLAFARECGFFPRACNPAAGWEKGKVERGGVGYLRQNFWPLRQFTDLADVNRQVREWLDGVANQRVHRETRQRPCDRFRPDCLRPLPALIPDYRDTVEALVHKDLRLQFDGNRYCAPPHLVGQRLTVKADAPSVALYHRNQEIVRYPRCWRRGQTFGAERFEKELLAHKAAAQRSQAQQRLIALLGSDCSQETVEAYLRGLADTNRSLSRQITELLLLVRQYGPQAVAAALQKALAARAFGADYVANLLRQQLSPRNPQPPLQLRDPELNQLVTDPLSLLDYDAFIVEARKEAYDSTGTEARTTKTGDDEPKAGTDPEGSGGEKP

SEQ ID NO: 303 - protein, 531 aa, synthetic construct
MLNTDRINEIHRLFHGEHWSARKIAQHLHMARKTLRKYIQSPVQIPAHRQRTSKIDAFKSTVADLLEQDPSASAVVILQRLRPLGYEGGITVLRNYVRQLRGPVHPPRAFVRMEPGPAERFEVDWGHFGALDYAGDKRNLYAFCLVEAHSRMLYVEFTHSQSFETFVRCHLHAFEVVHGVARECWYDNLLTVVAEHVGTLVRFNPRFLAFARECGFFPRACNPAAGWEKGKVERGGVGYLRQNFWPLRQFTDLSDVNHQVREWLDGVANQRLHRETRQRPCERFRPDCLRPLPALVPDYRDTVEALVHKDLRLQFDGNRYCAPPHLVGQRLTVKADASTVALYHRNQEIVRYPRCWRRGQTFGAERFERELLAHKAAAQRSQAQRRLIALLVSDCSHETVEAYLRGLADANRSLSRQITELLQLIRQYGPEAVAAALQKALAARAFGADYVANLLRQQLAPRNPQPPLQLRDPQLNQLVTDPLSLLDYDAFIVEARKEPHDSPGTEARTTETGDDEPKAGTDAEGSGGEKP

SEQ ID NO: 304 - protein, 493 aa, synthetic construct
MIDRRLIFEIHRMADDGLSGRKIARALQLDRTTVSKYLVEPNPLRAVVIKASKLDPFKDQIQEFLARDRDAPATVIQQRLKAQGFDGGLTILRDYLRKIRPKPKEAFIRFESQPGEQSQLDWGHFGSLSYGSTSRKLYCLAVIECHSRLLYLEFTHSQRQETLHRALFNAFQFFGGCPRELVHDNMLTAVIERDGPLVRFNEAFLDFLRPFHVVPLPCNVGQAHEKGKIEKGAIHYIRNNFWPLRSFHNLDDLQTQADQWRDEVANQRVHATTGERPIKRFIPESLRPLPDLLPDCRDTAPAKVHPDFSIHFDGNTYTVPPWLVGKTVLAKADQKTLTVYFKERAVATHQRIFERHRRIELPHHVEEARRHRNHKWLSDDVAILMSLGEDAKVYIEHLAETGGPLKKNVTKLLALKQDYGSAALLHAIGRALAHRAFGADYIENILYQEMTPSRAHPPVRIENREALNRIRLQEPSLADYDTFVATRRSRHDD

SEQ ID NO: 305 - protein, 504 aa, synthetic construct
MNHIQDIIRRLQMGESERRISRDMKISRVTVRKYHKIMKETGSLESPGVQTSGDELREALGPGVQAPRQISTVEPYRETILNWLKQGVEMTAIWLRLRENYGYKGGYSSIRRFVHRLETKEPEAFIRVHTEPGEDMQVDFGSVGQLYDPVSKRLRTAYVFVATLCYSRHQYAELVFDQKVATWIAVHKRTFEFFGGVPQRVIPDNLKAAVLKALVYDPILGEAYRRMALHYNFLISPTIPYTPWHKGKVESGVHYVKRNFMAGQEFVDINVGNKHLRYWIMNTAGVRKHGTTGEAPLYLFNENEKACLQPLSVEPFRLLEIRPVTIHPDCHVVITGSYYSVPYGYIGQELAAHVSENFVEIYKGDDLISSHPHSTRAGQWHTRMEHYPPAKAAYLIHTPDYCKKRGAKIGPSTKSVVEQLLADRPLDRLRSVQAILKLEESVGPKRLEAACARVLYFGDVRYRQIKLVLNAALDRDPLPETQPEQPALSHVFARNGEEFFGRPL

SEQ ID NO: 306 - protein, 401 aa, synthetic construct
RTLERRIRNWRAIHGPEQEVIFRQEHPPGRMGLSDFCDMRNLNVSVAGVPLDHRLYHFRLPFSGFESAHVVLGGESFVALAEGLQNALWTLGGAPQQHRSDSLSAAFRNLDADAKEDMTRRYEALCAHYGMTPTRNNKGVSHENGSIESAHGHIKAALEDELLLRGSRDFDDLGAWRKFVDELVGRRNARNAARIDLERAELKELPSRKTSDFEEERVSVTSSSAFTLRKVFYTVPSRLIGHKLLVRLHDDRLEVFQGSTHLFDLPRGRPGPNGKHGHVIDYRHVIHSLRRKPMALLNLVYREQLFPRRAYARAFDMLLAESGEKAACKTMVGLLALAHERACEAELAIVIEEELDAGRLPNLSTLTERFAPKTAAVPNVIVALPELAVYDALASLEGAAA

SEQ ID NO: 307 - protein, 545 aa, synthetic construct
MPLVSPAGLPYNGPMLNTDRINEIHRLFHGEHWSARKIAHHLHIARKTLRKYIQSPVQTPAHRQRTSKIDPFKSTVADLLQQDPTASAVVIMQRLRPLGYDGGITVLRNYARKLRGPMHPPRAFVRMEPGPAERFEVDWGHFGTLDYAGDKRNLYAFFLVEAHSRMLYVEFTHSQSFETFVRCHLHAFDALQGVARECWYDNLLTVVAEHVGTLVRFNPRFLAFARECGFFPRACNPAAGWEKGKVERGGVGYLRQNFWPLRQFTDLADVNRQVREWLDGVANQRVHRETRQRPCDRFRPDCLRPLPALIPDYRDTVEALVHKDLRLQFDGNRYCAPPHLVGQRLTVKADAPSVALYHRNQEIVRYPRCWRRGQTFGAERFEKELLAHKAAAQRSQAQQRLIALLGSDCSQETVEAYLRGLADTNRSLSRQITELLLLVRQYGPQAVAAALQKALAARAFGADYVANLLRQQLSPRNPQPPLQLRDPELNQLVTDPLSLLDYDAFIVEARKEAYDSTGTEARTTKTGDDEPKAGTDPEGSGGEKP

SEQ ID NO: 308 - protein, 487 aa, synthetic construct
MIFEIHRLSYEGLSLRRISAILGLSRQVVTKYLLDPAPPKALIKRPSKLDPFRSQIGRFLEVDPQASGQVILQRIRDLGFDGGYTILKDYLRTIRTPRKKEAFIRFESAPGDQCQVDWGHFGVISYGNTTRALYCLAVIESHSRMLYFEFTHSQGQQTLHRCLLNAFRFFGGSPKKLVHDNMKSAVVEREGPLTRFNEAFLSFLRPFKVVPIACNPGKAHEKGKVEKGAIHYIRYNFFPLRSFKDLDDLQAQANHWRDETANKRIHSTTGERPRDRFRKEAMTFLPDFLPDCRDSAQLRVYDDFAVHFDGNWYTVPPWAVGRKVSVKADNRTLTVYFKDRPIATHKRSWMRKQRVELPEHEEAAKRHKEKYWLSEEAAALLSLGEEVKVYLEELAATGQPLKRSLKKLLSLESDYGAQAFIEAIRHATTHRAFGVGYIENILIQKMTPKREHPPVTLSREPLNHIRLMEPSLAEYDAFVIKKRKGDH

SEQ ID NO: 309 - protein, 493 aa, synthetic construct
MIDRRLIFEIHRMADDGLSGRKIARALQLDRTTVSKYLVEPNPLRAVVIKASKLDPFKDQIQEFLARDRDAPATVIQQRLKAQGFDGGLTILRDYLRKIRPKPKEAFIRFESQPGEQSQLDWGHFGSLSYGSTSRKLYCLAVIECHSRLLYLEFTHSQRQETLHRALFNAFQFFGGCPRELVHDNMLTAVIERDGPLVRFNEAFLDFLRPFHVVPLPCNVGQAHEKGKIEKGAIHYIRNNFWPLRSFHNLDDLQTQADQWRDEVANQRVHATTGERPIKRFIPESLRPLPDLLPDCRDTAPAKVHPDFSIHFDGNTYTVPPWLVGKTVLAKADQKTLTVYFKERAVATHQRIFERHRRIELPHHVEEARRHRNHKWLSDDVAILMSLGEDAKVYIEHLAETGGPLKKNVTKLLALKQDYGSAALLHAIGRALAHRAFGADYIENILYQEMTPSRAHPPVRIENRQALNRIRLQEPSLADYDTFVATRRSRHDD

SEQ ID NO: 310 - protein, 513 aa, synthetic construct
MERIHMNHMRELIYRLRAGESQRRIARDLNMSRTTVGKYRAWAKAQGYLDATHPLPDDATLAAAWGEPTQPARAASSVEPYREGVQAWVEQGVEMVAIWQHLQDDYQYPGSYSSVRRFVNKMRSAAPEVFVRVHTAPGEEAQVDFGGVGQLYDPNSGRLRRAHVFVATLCYSRHQYAELVFDQKTPTWIGLHRRAFESWGGVPKRIVPDNLKAAVIKALVHDPILGEAYRRMAQHYGFVISPTRPRTPRHKGKVENGVHYVKRNFMAGREFLDIHTANQHLRTWVKERAGTREHGTTHKAPLYLFNEHERAALLPLPEEPFTLREVRLVTVHPDCHARIDKSYYSVPYVHVGQKLDAYISERIIEIYQGIELVATHERSLQPGEWHTRLEHYPKHKAAYLERTPAYCRQVAARLGEATSQVVETLLGDRPLYRLRSVQAILRLEETVGAERLEAACARALYFDDPSYRRVKAILNAALDREPLPEKVPDAPDQKHIFARSGDEFFADGEEEAA

SEQ ID NO: 311 - protein, 493 aa, synthetic construct
MIDYETYIRIRNYFERDGLNYGQIANALALDQRTVARWANAKRYQPRNSTPRKSKLDPFKNDILRMLEKHPYTAAQIFQRIKENGFDGGSTIVQDYVKKIRPPKTKAYLKLIFAPGECAQVDWGSYGTVRVGSTTRRLSFFVMVLCHSRMMYIEFTVSQTMEHFLGCHQNAFYFFGSVPQKIMVDNLKSAVLKRTVGHAPVFNPRYLDFAEHYGFSIVPCNVGKGNEKGQVERGVGYAKKNLLNGLDIPDFKIMKPVAQNWLETVANIRTHRETGKRPVDMFREEKSSLQPLPVEPYDIGIIKQMRASRQFRITIDTNSYSVPAQLAGVRMTAKMYPDRICFYHDNKLVARHVRSYDRRQDFEHPDHPKVLLEQRKKARDQKVFMRFLSLSDNAQEYYRQLQQRRMNPLHHIRQIVALSEIYSKEQVTIAIEDAFSFSAFSCEYIANLLEQRSRPVNEPGVLHLTRSSDLLDLTIEHPDLSIYNKTIDEDKNE

SEQ ID NO: 312 - protein, 479 aa, synthetic construct
MIDYETYVRIRNYFERDGLRVARWANEKRYQPRKATTRKSKLDPFKNDILQMLEKHPYTAAQIFQRIKEDGFDGGITIVEDYVRRVRPPKTKAYLKLVFAPGECAQVDWGSYGTVRVGSTTRRLSFFVMVLCHSRMMYIEFTVSQTMEHFLGCHQNAFHFFGSVPQKIMVDNLKSAVLKRIVGHAPVFNPRYLDFSEHYGFSIVPCNVGKGNEKGQVERGVGYVKKNLLNGLDIPDFKIMKPVAKNWLETVANIRTHGETGKRPVDMFQEEKSSLQPLPVEPYDIGIIKQVRVSRQFRITIDTNSYSVPAQLAGVRLTAKMYPDRICFYHENKLVARHVRSYDRRQDFEHPDHPKVLLEQRKKAKDQKIFMRFLSLSDKAQEYYRQLQHRRMNPLYHIRQIVALSEIYSKEHVTMAIEDAFSFSAFSCEYIANLLEQRSRPVKEPGVLHLTRSSDLLDLVIDHPDLSIYNKAIDEDKDE

SEQ ID NO: 313 - protein, 493 aa, synthetic construct
MIKKRTIFEIHRLKNLGWSDRRIARELRVGRTTVRKYLENPEQTVSKKTPKPSKLGPYRDLVDQLLEQDPLVKAPVILQRLQQNGFDGKITILRDYLQKIRGQVKYREPFIRFESPPGKQMQIDWGHFGSLSYGDDKRKLYALAVTESYSRVSYVEFTHSQKQEALHHCLLNAFKFFGGTPEEIVVDNMLTAVIERQGSLIRFNDAFLDFLRVFKIVPVACNVRAPHEKGKIESIIKYLRRNFWPLRSFTDLKDVQGQVIEWLNTVANVRIHQTTGQRPKDRFSKVTLRALPELLPDCRETSQVLVHKDFAVRFEGNTYTTPPWCIGKKLILKADKTTVTIYHQQKPVATHSRCWKRKKRIELPSHREQVKKMKKKLWQDKQIAAFLSLGQEARDYLEALSKARQPIKKNVSRLLSLKDEYGTLSLIHAIKKALNHKAYGADYIENILYQEMTPQNHHQPVKLKNKDLNHIRLTEPSLAEYDTYILKRRDNDD

SEQ ID NO: 314 - protein, 487 aa, synthetic construct
MLNREQVDTLYRLHYREKWSVRRIARHLKISRQTVRKYLAGPILTTVKRRRPSKLDPYKDLIAQLLEEDSRVAAPRILQILRQLLGDYLKQVRPRKKRGFVRIEEQPGESFQVDWGHFGTLDYEGDKRKLYAFVLVEAHSRRLFVEFTHSQRFETFVRCHQHAFRFMGGVARKIVYDNLLTAVAERDGRLVRFQPRFWAFAREYGFNPHACTPRAAWEKGKCERAISYLRKNFWPLRTFRDLQDVNRQVREWLKDIANQRLHSETRETPEKRFRPKALLALPTLDPDYRDTETPLVQKDLRLRFDGNKYCAPQRFIGKRVTLKADSQSVTIYYRNREIVRYPRSWRRGRTMGAEKFEKPLLENRPAARCSQAHRQLIALLGETVEEYLQQLAGNNRVLSRQIEELIDLVREYGPDAVLSAIRKAHKARAFGADYISNILYQNFTSRNPQPRLQLKDPRLNQLTIDPVSLHEYDELILLQRKNHESSD

SEQ ID NO: 315 - protein, 494 aa, synthetic construct
MKIDKQTIFEIHRLNDLGWSERKIARHLRLSRPSVKKYLDNPDQSPGKRMSKPSKLDPYRDLIEQFIEQDPDVKAPVVVQRLQDKGFDGKVSIVRDYLKKLRGRKAYRKAFIRFESPPGKQFQIDWGHFGHLQYGDTKRKLYAMAVIESYSRMLYVEFTHSQKQETLHQCLLNAFLSFGGTPEEIVVDNMVTAVIERQASLVRFNDAFLDFLRPFKVVPLACNVGAANEKGKIESAIKLLRQNFWPLRSFTDLADVQLQAKQWLETVANVRIHQGTGQQPKDRFDKVRLRPLPDLLPDCRETCLLKVYKDFAVRFDGNAYTTPPWAIGKQVTLKADPFTVTIYLNEKKIATHHRCWKRKKRIELPEHQQQVKKLQKKMWQDQQIAALSSLGQPAVDYLKALVEDRQPIKKNVRKLLALKDEYGPTSLMYAILKATSFKAYGADYIENILYQEMTPKNQHPPVKLKEEALNRIRLNEPCMADYDAYALKWRRQDD

SEQ ID NO: 316 - protein, 490 aa, synthetic construct
MIDYATFCKIHALSKDGLNAQQIAPEVGLGFKTVQRWLKTETFTQRKASERASLLDPHKATIVRLLQHHEYTSVQVMQKIQEAGYTGGYTILKDYVRLIRPPSKLAFLMLSFDPGECGQVDWGSAGVVQVGNTRRRLSFFVMVLAYSRMMYVEFVLSEAQDQFLRCHERAFEYFGGVPESVMIDNLKAGVLSHPLGEKPVFHPKYIDFANHYGFEISACNVRAPNEKGRVENGVGYVKKNFLNGLGRDSFDAINPAARIWLDTVANPRIHGTTHKKPVEMFKEERPKLSPLTLMPYDVGVSRLITVNSQFRITCETNTYSVPAEYASKRVLLRTYPDKLLIYHEHNLIAEHIRDYDRRLDHLIPDHQRKLLQQKRKARDQQHLMHLMRLSPHAGEYVRQLQERRLNPTVHIRKIIALNEIYGEKATARAIEDAIEFHAYSSEYIANILHQRNQTTPEASALHLTRNEDLLDIELPAPNLNIYTTPKEPNP

SEQ ID NO: 317 - protein, 489 aa, synthetic construct
MIDYALFCKIKHLKEHEGLTGTQIAAELALDPRTVDKWINQEQFVPRKTTPRPSKLDPFKKDIIRMLEAHPYSAAQILQRISEQGFDGRYSIVKDYVRKVRPPRFQAFLTLSFAPGECAQVDWGSYGSVNVGNTRRRLSFFVMVLCYSRMMYVEFTVSQTMEHFLACHRNAFGFFGLVPQKIMVDNLKSAVLKRIVGQAPVFNPKYLDFANHHGFNIAACNVGRGNEKGRVENAVGYVKKNFLAGLDIPDFSAIEPAARHWLQTVANVRIHGVTRKKPVELFEKERSYLCPLPSNPFDIATVCQVRASSQFRIILDTNRYSVPAEYASTGLTLKTYPDRLCIYHNEKLIARHVRSYDRHCDFEDPDHPKALLAQRKKANDQKIFMRFLTLSPLADQYYRKLEQRRMNPHHHVRKIVALSEIYNLDCVARAMADAFAFEAFSCEYIANLLEQRARRLPEPGALHLTRGEDLLEIKIEQPDLSIYERKNHD

SEQ ID NO: 318 - protein, 495 aa, synthetic construct
MATDPKTIEAIYRMSLEQKLSGHEIARQLHVSRRTIKKYLQNPLPKVTVRKPRASKLDSFKPVIRELLEQWPRASSVVIGQRIQSIGYTGGRSILKEYLATLRRIGTPPRAYVRIESSPGDCFQVDWGHFDSIDYQGDKRKLYAFCCIECHSRRLYVEFTHSQCFETFVRCHIHAFQFMGGRPRECLYDNLVTAVAEHDGRIVRFNPRFLAFARELGFYPRACNKGAGWEKGKVENSIGYLRKNFWPLRTFTDLADVNSQVRQWLEQIANKRIHRETRQTPDERFRPECLGPLPPLIPDYRDTDVPLVHTDFRLHFDGNRYCVHPRYRGSHLTVRADSQSVAIYDHETEIARYVRCWRRGQILGADRYQKELLEQRPAAERSAAQRRLVLLLGETGESYLRQLAETDRSLSRQIKELLILVRHYGPEAVTGAIRKAQGLGAFGADYIANILMQEQSAREMQPLLRLKDPRLNDLATDPLSLLEYDALILTRRSES

SEQ ID NO: 319 - protein, 516 aa, synthetic construct
MPENRKETMDIREMLRRLQKGQSDRAIATAMQVDRKTVGKYRNWATEQELLAGALPALDALQTLLEETLNPPPPPQNTSTVEPYRKLVVEWRQAQVEIAAIHQRLQERGYQGSYAAVHRFVRALEPRVPEATVRVETPPGAEAQVDFGYVGLMLDPETGAPRKTWVFVMTLAWSRHQYAEFVFDQQIATWLELHCHAFEFFGGVPERIVPDNLKAAIVQACWHEPEAQQAYRECAEHYGFLISPCRPRTPQHKGKVEQGGVHYVKRNFCGGREPTPVPELNQQVRQWCHTTAGQRLHGTTKQRPLERFETEQPLLRPLPGTPYDLAVWKTATVARDCYVTFERAYYSVPFRLVGQQVWVRGGIRAVQLYTTDYHLVATHDRAALPGQRMTHLDHLPPHKVPGLLLTREACRLQAAEIGPATQQVVAVLLNHRPEDRLRTAGRLLRLAERFSPQRLEAACVRALGFDDLAYNTIKRILEGELDVAEAPGVTPAPPARAFVRSAAELVGHLLGGVTWK

SEQ ID NO: 320 - protein, 519 aa, synthetic construct
MAGTIIDMSKIKQLLQLSRDGVSNRQIAKRLLISRDKVNEFVKAAQEDPLGLLGLLKLEDPVLERRFHPGNPAYSDQRMEIFLEHLPDFIEQLSHPHVTRQIVWEDYRMMYPDGYGKSQFFFHLAQNLKAQKPASSVLPHEPGLELFVDFAGDTLGYVDPETGECIQTQTFVATLACTDYAFAMCVPSQKTEDFLYALRRSLEYYGGVPKIVVPDNLKAAVIKADKYEPAINKALEDMGNHYGFVVVPCQPAKPKQKSKVENQVQIIYHRIYARLYNRQFFSLEELNEAVAGFLRTHNQTRMQQRPYTREEHFHAVEKEVLKPLPDVPYMMKRYADVTVQQNGHVYLSCDKRYYSVPYQLVGYKAKIIFTASLVKIFVKGEQVAVHPRVRSFGYSSFDEHLASNTLAFTKRSATYYKQRAQSVSEPLYLLFNALYECSNGSCPPEYYYKTCDMMLRLQKDYRPELFDRACAICLENHLFTGKRLENVIKTLVHTSKEIESTATPNPTNHANMRGILFFQ

SEQ ID NO: 321 - protein, 489 aa, synthetic construct
MIDYETFMKIKSYHEKDGLNCNQIAAIMGLSFKTVDKWLNEKRYRMRKSADISSKLDPFKNQIVQMLEKYPYSAAQILLRIKDNGFNGGYTIVKDYVRKVRPPKTRAFLKLSFAPGECAQVDWASYGSVNVGSTRRRLSFFVMVLCHSRMMYVEFTVSQTMEHFLACHQNAFEYFGSVPKKIMVDNLKSAVLSRIVGQAPVFNPKYLDFADHCGFNITPCGVGKGNEKGRVENAVGYVKKNFLAGLDIPDFTAVNPAARYWIDTVANVRIHGETRKKPLELFKEERPCLNALPVNPFDIATVSQVRASSQFRITIDTNRYSVPAEYAGRALTLKTYPDRLCIYCNDKLIARHVRSYDRYRDFEDPDHPRELLAQRKKARNQKIFMRFLTLSPKAEQYYRKLEQRRMNPYHHVRKIVALSEIYPLESVARAMEDAFTFEAFSCEYIANLLEQRSRCLPEAGALHLTRREDLLDIKIEQPDLTIYERKDHD

SEQ ID NO: 322 - protein, 489 aa, synthetic construct
MIDYETYMKIKSCHEKDGLNCNQIAGIMGLSFKTVNKWLNEKRYHMRKSTNRSSKLDPFKNQILQMLEKYPYSAAQIFLRIKDNGFDGGSTIVKDYVRKVRPPKTKAYLKLSFAPGECAQVDWGSYGSVNVGSTRRRLSFFVMVLCYSRMMYVEFTVSQTMEHFLACHQNAFDFFGTIPKKIMVDNLKSAVLKRIVGQAPVFNPKYFDFANHYGFTIAACNVGAGNEKGRVENGVGYVKKNFLAGLDIPDFAAIHPAARHWLDAVANVRIHGETRQKPVELFEKERSFLNTLPANAFDVATVSQVRASSQFRIPVDTNRYSVPAEYAGARLTLKTYPDRLCMYKDDKLIARHVRSYDRHQDFENPDHPKELLRQRKKARDQKIYMRFLTLSPKAEQYYRMLEQRRMNPRHHVQKIVALSEIYAPEAVARALDDAFTFQAFSCEYIANLLEQRSRSLPEPGALHLIRSEDLLDIDIEQPDLSIYERKGRE

SEQ ID NO: 323 - protein, 488 aa, synthetic construct
VIDYETFCKIHDCRERQRLTVAQTARALHLHPKTIAKWSARSHFEPRRSVSRGSVLDPFKPRVTRLLDTYPYSAVQIFQRLREEGYGGGMTILRDYVRRIRPPKRPVYLKLHFVAGECAQVDWGSFGSVVVGNTRRRLSFFVMVLAYSRRLFVEFTVSQTMEHFLACHEHAFAELGVPSKLMVDNLKSAVLQRLAGVAPVFNPRYLDFARHHGFEIVACNVGRGNEKGRVESGVGYVKKNFLRGLELSEFSAIQAAAQVWLDTVANVRIHGETQRRPIDLFAEERSRLRRPNPHPYDLGRTSTTIASSQFRITLDTNHYSVPCAYAHRRLTVKAYPDRVCIYFEDQLIARHPRRYDRHEDIEDPDHAKGLIAQRGRAREQRLMMQFLALSPDAAAYYEGLEQRRFNARQHVRKILALAEIYPTDAVARAISDGLCFEAFSAEYITNILEARARALPEPGPLQLTRRHDLLDIDIAPPDLNAYERDDHG

SEQ ID NO: 324 - protein, 502 aa, synthetic construct
LPGRHVTDRQMRLFMQFRKFDSAAVAAAKAGFSPATGYRLEKDPRLPSQKTAPRARRRPDPLEGVWDSEVVPMLKAAPGLRPIGVLEELRRRHPELGAGVRRTLERRIRNWRAIHGPEQEVIFRQDHPPGRMGLSDFCDMRNLNVSVAGVPLDHRLYHFRLPFSGFESAHVVLGGESFVALAEGLQNALWTLGGAPQQHRSDSLSAAFRNLDADAKEDMTRRYEALCAHYGMTPTRNNKGVSHENGSIESAHGHIKAALEDELLLRGSRDFDDLGAWRKFVDELVGRRNARNAARIDLERAELKELPPRKTSDFEEERVSVTSSSAFTLRKVFYTVPSRLIGHKLLVRLYDDRLEVFQGSTHLFNLPRGRSGPNGKHGHVIDYRHVIHSLRRKPMALLNLVYRDQLFPRRAYARAFDMLLVESGEKAACKTMVGLLALAHERACEAELAIAIEEELDAGRLPNLSALTDRFAPKTAAAPNVIVALPELAVYDALASLEGAAA

SEQ ID NO: 325 - protein, 532 aa, synthetic construct
MLSIEQINEIHRLAGGEHWSIRRIARQLRLAARTVRKYLVTPVPLPVRRPRASKLDPFKPLISELLEQDPHAPGAVILQRLQAAGYAGGHTILRDHLQRVRVPHSAPRAFLRMEPGPGERFEIDWGHFGALDYQGDKRKLYAFCLIEAHSRMLYVEFTHSQSFETFARCHQHAFAALNGVSRECWYDNLMTAVAEHDGRLVRFQPRFLAFAREYGFYPHACNPGAGWEKGKVEKGGIAYLRSNFWPLRTFTDLTDVNRQVRQWLDEVANVRLHRETRQRPCDRFRPDTLRPLPALTPDYRDTATVFVYKDLRWHFDANRYCAPPRFIGQHLTAKGDASSVTLYDQQGTEIVRYARCWRRGRTLGGERFQKELLDHHPAALRSEAQQRLLKLLQGVCPAETVEAYLRGLANSDRSLLRQLQELLALFRAYRPEQVAEALQKALAARAFGADYVANLLHQIASPREPQPPLQLRDPELNQLTTDPLSLLDYDAFILKDRKESTDDSGRETDSTSPDDHGPETGDDDPGSGQPKS

SEQ ID NO: 326 - protein, 496 aa, synthetic construct
MVMHPKTIEAIYRMSHEQKLSVRQISRQLHVSRKAIRKYLDKPFAMPIVRKPRSSKLDPFKPLIREFLEQCPSANSEVIAQRIRPAGYVGGRSILKEYLAIVRRTEQPARAYVRVESSPGDRFEIDWGHFDAIDYQGDKRKLYAFCCIECHSRRLYVEFTHSQCFETFVRCHIHAFQFMGGRARECLYDNLATAVAEHDGRIVRFNPRFLAFARELDFYPRACNKAAGWEKGKVEKGGVGYLRHNFWPLRTFVDLADINSQARQWLEEIANKRIHRETRQSPDERFRPECLRPLPPLMPDYRDTASPLVHKDIRLCFDGNHYCVPPRYVGFRLTIKSDSQSVAIYDHDHEVARYVRCWRRGQTLGAERFEKELLEHRPAAERSAAQRRFVMQLGDAGESYLRGLAETDRSLSRQINELLSLVHQYGPESVIAAITKAQCAGAFGADYIANILMQEQSAREMQPRLLLKDPRLNDLATDPLSLLDYDALILTPRSES

SEQ ID NO: 327 - protein, 545 aa, synthetic construct
MPLVLLAGLPYNRPMLNSDRINEIHRLFHGEHWSARKIAHHLHMARKTLRKYIQSPVQTPARRQRTSKIDPFKSTVADLLEQDPTASAVVIMQRLRPLGYEGGITVLRNHVRQLRGPVHPPRAFVRMEPGPAERFEVDWGHFGTLDHAGDKRNLYAFCLVEAHSRMLYVEFTHSQSFETFVRCHLHAFEALHGVARECWYDNLLTVVAEHVGTLVRFNPRFLAFARECGFFPRACNPASGWEKGKVERGGVGYLRQNFWPLRQFTDLADVNHQVREWLDHVANQRLHRETRERPCERFRSDALRPLPALVPDYRDTVEALVHKDLRLQFDGNRYCAPPHLVGQRLTVKADASSVALYQRNQEIVRYPRCWRRGQTFGAERFEKELLAHKAAAQRSQAQRRLIALLVSDCSQETVEAYLRGLADCNRSLSRQITELLQLIRQYGPQAVAAALQKALAARAFGADYVANLLRQQLSPRNPQPPLQLRDPELNQLVTDPLSLLDYDAFIVEARKEPHDSPGTEARTTETGDDEPEAGTDAEGSGGEKP

SEQ ID NO: 328 - protein, 496 aa, synthetic construct
MVMDSAQINAIYRRHHEDKWSVRRIARELHLGRKTVKKYLCSPAGVPSKRKPRKTKLDDFKSVIRELVERDPKASAVVIAERLRPLGFTGELTILRHYLRALRDVVHLPRAFVRVESSPGDRFEIDWGHFGALDYQGDKRKLYAFCLIECHSRRLYVEFTHSQSFETFVRCHIHAFRFMSGVARECLYDNLWTAVTERDGRIIRFNPRFLAFAREFGFYPRACNPAAGWEKGKIERGGIGYLRQNFWPLRTFTDLSDVNRQVRQWLEEVANKRVHSLTRERPDDRFRPETLRPLPVLDPDYRDTVVARVHKDIRLCFDANRYCVPPRYVGRELMIKADSSSVTIYDREREIFRYPRSWRRGQTFGAERFEKELLERRPGAELTRGQQRLVTLVGPIAESYLRGLAETDRSMTCQIRHLLAVVREYGPEAVASSLAKAQAAGAFGSDYVANILLQEHFPREQQPPLRLQDQSLNELVTDPLSLLEYDAFILSERSEP

SEQ ID NO: 329 - protein, 522 aa, synthetic construct
MAGKIIDMSKIKQVLQLHMVGHSNRSISRELVINKETVNNYVKQAQNDNRNLKELLKMEDPELESRFHLGNPAYSDLRLEEFMKLLPYLKEQLSCKHVTRYLVWQEYKKKYPSGYGRSQFFFHLKQNLVAIKMPSTVLTNSYTPGEKLFVDFAGDTLSYVDVEIGEIIKVQVFIGTLPFSDYAYAICLPSQKVEDFLYGIKKCMEFMGGAPKILVTDNLKSAVVKADRYEPTLNRALEDMGNYYNFVVIPCQPYSPRQKALVEDQVRLVYRRVYATLRHSTFYSLKALNEAVWEKMLEHNQTRMQQRPYSREEHFNAAEKSALGPLPEAPYETKYYADLTVQLNGFIYLGRDKHYYSVPYTLIGKKARIIYTRSLVKVFVDNKLVATHPRITGFGYTKIDAHLASNARAITSRSPGYYKKRAGMLSQPLETLISNLFNSINGTKPPEYYYKTCDMFFRLQKTYPREDFDKACRICTDNQVYRGKALESIVKNVITTRKEQQESTISPEPTDHRNMRGTLYYK

SEQ ID NO: 330 - protein, 489 aa, synthetic construct
MIDYELFCKIRHLKDHEGLTAHQIAGELAMDPRTVVKWLARERFCQRKALPRASKLDPFKAEIARWLQAHAFTAAQLLMRIREQGYAGGYSIVKDYVRSIRPPKSCAYLTLAFAPGECAQVDWGSYGSVAVGNTRRRLSFFVMVLCYSRMLYLEFTVSQSLEHFLACHQNAFHFFGSVPKKIMVDNLKSAVLKRILGRPPVFNPRYLGFANHYGFAIAPCNVGRGNEKGRVENAVGYVKKNFLAGLEIPDFAALGPAARNWLQTVANVRLHGETRKKPVELFEAERPCLLPLAINAFDIATVSQQRASSQFRISCDTNRYSVPAEYAGRALTVKTDPERICVYAQDKLIARHIRSYERYQDFEDPDHPKALLAQRKKARDQKIFMRFIALSPKADLYYRKLADRRLNPQQHVRKIVALSEIYGNEPVGRAIEDAFTFEAFSSEYVANLLQQRTRFQEEPGALHLTRREDLLEINLEYPDLSVYERNTDE

SEQ ID NO: 331 - protein, 490 aa, synthetic construct
MIDYELYCKIRHLKEQEGLNAHQIAGELAMDPRTVAKWLTRERFCPRKASPRSSKIDPFKNEIARMLQTHAFTAAQILVRIRGQGFAGGYSIVKDYVRSIRPPKSPAYLTLAFAPGECAQVDWGSYGSVAVGSTRRRLSFFVMVLCYSRMLYCEFTVSQSMEHFLACHKNAFDFFGCAPKKIMVDNLKSAVLRRILGRAPVFNPKYLDFANHCGFTIAACNVGRGNEKGRVENAVGYVKKNFLAGLEIPDFAAIAPAARNWLETVANVRVHGETRKKPVELFEAERPCLLPLPINDFDIATVCPQRASSQFRITLDTNRYSVPAEHAGRALTVKTDPERICVYAAEKLIARHIRSYERYQDFEDPDHPKALLSQRKKARDQKIFMRFISLSPKADLYYRKLHERRLNPQEHVRKIVALSEIYGHEPVARAIEDAFVFEAFSCEYIANLLQQRARFHKEPAALHLTRREDLLDITLEHPDLSIYYERNTDD

SEQ ID NO: 332 - protein, 489 aa, synthetic construct
MIDYETYVRIRNYVTRDGLNISQISEELGLDQRTVARWVNQTRYIQRKPALRTSKLDPFKKDILQMLEKHRYTGRQVFQRITENGFEGGFTIVTDYVRKIRPTQTTPFLKLVFAPGECAQVDWGSYGTVKVGSTTRRLSFFVMVLCHSRMMYIEFTVSQTMEHFLGCHQNAFQFFGAVPQKIMVDNLKSAVLKRTVGRAPVFNPRYLDFAGYYGFTIVPCNVGKGNEKGIVENGVGYVKKNLLNGLCISDFGIMAPVAQNWLDTVANVRSHRETGKRPVDLFQEEKPILQRLPLEPYDIGVVKQARASRQFRVTIDTNRYSVPAQLAGVGLTVKLYPDRLCFYHENKLMARHVRSYDRLRDFEHPDHPKAVLAQRKKAQEQKIFMTFLTLSDKAREYYRQLEQRRMNPFHHIRQIVALSEIYPKEKVALAIEDAFSFSAFSCDYIANLLEQRSRIIKEPGVLHLTRSSDLLDLTIEKPDMSIYNIGGEK

SEQ ID NO: 333 - protein, 490 aa, synthetic construct
MIDYELYCKIRHLKEQEGLNAHQIAGELAMDPRTVAKWLTRERFCPRKASPRSSKIDPFKNEIARMLQTHAFTAAQILVRIRGQGFAGGYSIVKDYVRSIRPPKSPAYLTLAFAPGECAQVDWGCYGSVAVGNTRRRLSFFVMVLCYSRMLYCEFTVSQSMEHFLACHKNAFDFFGCAPKKIMVDNLKSAVLRRILGRAPVFNPKYLDFANHCGFTIAACNVGRGNEKGRVENAVGYVKKNFLAGLEIPDFAAIAPAARNWLETVANVRVHGETRKKPVELFEAERPCLLPLPINDFDIATVCPQRASSQFRITLDTNRYSVPAEYAGRALTVKTDPERICVYAAEKLIARHIRSYERYQDFEDPDHPKALLSQRKKARDQKIFMRFISLSPKADLYYRKLHERRLNPQEHVRKIVALSEIYGHEPVARAIEDAFVFEAFSCEYIANLLQQRARFHKEPAALHLTRREDLLDITLEHPDLSIYYERNTDD

SEQ ID NO: 334 - protein, 491 aa, synthetic construct
MIDYETYMKIKSYSEKDGLNCSQIAAITGLTFKTINKWLNEKRYRMRKSSGRSSKLDPFKNQIAGMLEKYPYTSAQIFLRIKENGFDGGYTIVKDYLSKVRPPKTKAYLKLFFAPGECAQVDWGSYGSVNVGSSRRRLSFFVMVLCYSRLMYVEFTVSQTMEHFLACHQNAFNFFGTVPKKIMVDNLKSAVLKRIVGQAPVFNPRYLDFADHYGFDIAACNVGAGNEKGRVENGVGYIKKNFLAGLDIPDFAAVHPAIRHWLDAVANVRIHGETHKKPLELFEKERSFLNALPANLFDVGAVSQVRASSQFRVPVDANRYSVPAEYAGALLTLKTYPDRLCIYSDNKLVARHVRSYDRHQDFEDPDHPRELLIRRKKARDQKIHMRFLTLSPKAEQYHQMLEQRRMNPHHHVQKIVALSEIYGPEAVSRAIDDAFTFKAFSCEYIANLLEQRCRSLPEPGALHLTRSEDMLDIDIEQPDLSIYKRKDHDDK

SEQ ID NO: 335 - protein, 489 aa, synthetic construct
MIDYELFCKIRHLKDHEGLTAHQIAGELAMDPRTVVKWLARERFCQRKALPRASKLDPFKAEIARWLQAHAFTAAQLLMRIREQGYAGGYSIVKDYVRSIRPPKSCAYLTLAFAPGECAQVDWGSYGSVAVGNTRRRLSFFVMVLCYSRMLYLEFTVSQSLEHFLACHQNAFHFFGSVPKKIMVDNLKSAVLKRILGRPPVFNPRYLDFANHYGFAIAPCNVGRGNEKGRVENAVGYVKKNFLAGLEIPDFAALGPAARNWLQTVANVRLHGETRKKPVELFEAERPCLLPLAINAFDIATVSQQRASSQFRISCDTNRYSVPAEYAGRALTVKTDPERICVYAQDKLIARHIRSYERYQDFEDPDHPKALLAQRKKARDQKIFMRFIALSPKADLYYRKLADRRLNPQQHVRKIVALSEIYGNEPVGRAIEDAFTFEAFSSEYVANLLQQRTRFQEEPGALHLTRREDLLEINLEYPDLSVYERNTDE

SEQ ID NO: 336 - protein, 489 aa, synthetic construct
MIDFDLFVRIKNYHEQKGLNAAQIARELELDPRTVAYWLSQKKYRPRNPVQRPSRLDPFKSSILRMLENHPYTAAQILHKIREEGFDGGYTILTDYVRKVRPRRTPAFLKLSFAPGECAQVDWGSHGSIQVGETRRRLSFFVMVLCYSRMMHLEFTVSQTMEHFLACHQNAFAAFGSVPKRIMVDNLKSAVLKRIVGAAPVFNPKYLDFANHFGFTIAPCGVGKGNEKGRVENGVGYVKKNLLAGLDLPDFHAMAPAAKQWLDTVANVRIHGETRRKPIDMFQEERASLLPLPPYPYDLGAIAQVRASTQFRVSLDANHYSVPAEYAGSHLTLKTYPDRICIYHGEKLIARHTRSYDRNKDFEDPDHPKELIAQRKKARDQKLFMRFLTLCPKAQDYYLELEKRRMNPRHHVQKIVALSEIYGVGPVARAMEDAFFFQAFSCEYIANLCEQRARRLPEPGALHLTRRSDLLDLEVQQPDLSIYQEDKRD

SEQ ID NO: 337 - protein, 532 aa, synthetic construct
MLNLEQINEIRRLAGGEHWSMRRIARQLRLAARTVKKYLVTPVPSPVRRPRPSKLDPFKPLIRELLEQDPHAPGAVILQRLQAAGYAGGHTILRDHLQRVRASHSAPRAFLRMEPGPGERFEIDWGHFGALDYEGDKRKLYAFCLIEAHSRMLYVEFTHSQSFETFARCHQHAFAALHGVSRECWYDNLLTAVAEQDGRLVRFQPRFLAFAREYGFYPHTCNPGAGWEKGKVEKGGVAYLRSNFWPLRSFTDLTDVNRQVWQLVDEVANVRLHRETCQRPCDRFRPDTLRPLPALTPDYRDTATVFVYKDLRWHFDANRYCAPPRFLGQHLTAKGDASSVTLCDRQGAEIVRYARCWRRGRTVGGERFQKELLEHRPAALRSEAQQRLLQLLLGVCPAETVEDYMRGLADSDRSLLRQLQELLALFRAYRPEQVAAALEKALAARAFGADYVANLLHQIASPREPQPPLQLRDPELNQLTTNPLSLLDYDAFILKDRKESGNDSGREIDPTSPDDHGPETGDPDPGSGQAKS

SEQ ID NO: 338 - protein, 532 aa, synthetic construct
MLSIEQINEIHHLAGGEHWSMRRIARQLRLAARTVKKYLVAPVPSPVRRLRPSKLDPFKPLIRELLEQDPHAPGAVVLQRLQAAGYSGGHTILRDHLQRVRVSHSAPRAFLRMEPGPGERFEIDWGHFGALDYEGDKRKLYAFCLIEAHSRMLYVEFTHSQSFETFARCHQHAFAALHGVSRECWYDNLLTAVAEHDGRLARFQPRFLAFAREYGFYPHACNPGAGWEKGKVEKGGVAYLRSNFWPLRTFTDLTDVNRQVRQWLDEVANLRLHRETCQRPCDRFRPDTLRPLPALTPDYRDTATVFVYKDLRWHFDANRYCAPPRFIGQHLTAKGDASSVTLYNRQGAEIVRYPRCWRRGRTLGGERFQKELLDHHPAALRSEAQQRLLKLLQGVCPAETIETYLRGLADSDRSLFRQLQELLALFRAYRPEQVAEALQKALAARAFGADYVANLLHQIASPREPQPPLQLRDPELNRLTTDPLSLLDYDAFILKDRKESADDSGRETDSTPPDDHGPEAGDDDPGSGRPKP

SEQ ID NO: 339 - protein, 532 aa, synthetic construct
MLNIEQINEIHRLAGGEHWPMRRIARQLHLAARTVKKYLVTPVPSPVRRPRASKLDPFKPLISELLEQDPHAPGAVILQRLQAAGYSGGHTILRDHLQRVRVSPSVPRAFLRMEPGPGERFEIDWGHFGALDYEGDKRKLYAFCLIEAHSRMLYVEFTHSQSFETFVRCHQHAFAALHGVSRESWYDNLMTAVAEHDGRLVRFQPRFLAFAREYGFYPHACNPGAGWEKGKVEKGGIAYLRSNFWPLRTFTDLTDVNRQVRQWLDEVANVRLHRETGQRPCDRFRPETLRPLPALAPDYRDTATVFVYKDLRWHFDANRYCAPPRFIGQHLTAKGDASSVTLYDRQGEEIVRYARCWRRGRTLGGEHFQKELLDHHPAALRSEAQQRLLKLLQGVCPAETVEAYLRGLADSDRSLFRQLQELLALFRAYRPEQITAALHKALAARAFGADYVANLLHQIASPREPQPPLQLRDPELNQLTTDPLSLLDYDAFILKDRKEPADDSGRETDSTSPDDHGPETGDDDQGSGQPKS

SEQ ID NO: 340 - protein, 532 aa, synthetic construct
MLSIEQINEIHRLAGGEHWPMRRIARQLHLAARTVKKYLVTPVPSPVHRPRASKLDPFKPLISELLEQNPHAPGAVILQRLQSAGYSGGHTILRDHLQQVRVSRSAPRAFLRMEPGPGERFEIDWGHFGALDYQGDKRKLYAFCLIEAHSRMLYVEFTHSQTFETFVRCHQHAFAALQGVSRECWYDNLMTAVAEHDGRLVRFQPRFLAFAREYGFYPHACNPGAGWEKGKVEKGGVAYLRSNFWPLRSFSDLTDVNRQVRQWLDEVANVRLHRETRERPCDRFRPDSLRTLPALTPDYRDTATVYVYKDLRWHFDANRYCAPPRFIGQHLTAKGDASSVTLYDQQGAEIVRYARCWRRGRTLGGERFQKELLNHHPAALRSEAQQRLLKLLQGVCPAETVEAYLRGLADSDRSLLRQLQELLGLFRAYRPDQITAALEKALAAHAFGADYVANLLHQIASPREPQPPLQLRDPELNQLTTDPLSLLDYDAFILKDRKESVDDPGRETDSTSPDDHGPEAGDDDPGSGQPKS

SEQ ID NO: 341 - protein, 532 aa, synthetic construct
MLSIEQINEIHRLAGSEHWSMRRIARQLRLAARTVRKYLVTPVPSPVRRPRPSKLDPFKPLISELLEHDPHAPGAVILQRLQAAGYPGGHTILRDHLQRVRVPHSARRAFLRVEPGPGERFEIDWGHFGALDYEGDKRKLYAFCLIEAHSRMLYVEFTHSQSFETFARCHQHAFAALHGVSRECWYDNLLTAVAEHEGRLVRFQPRFLAFAREYDFYPHACNPGAGWEKGKVEKGGVAYLRSNFWPLRSFTDLTDVNRQVRQWLDEVANVRLHRETRQRPCDRFRSDTLRALPALTPDYRDTATVFVYKDLRWHFDANRYCAPPRFIGQHLTAKGDAASVTLYDGQGAEIVRYARCWRRGRTLGGERFQKELLDHRPAAVRSEAQQRLLKLLQGVCPAETVEAYLRGLADSDRSLIRQLQELLALFRAYRPEQITAALEKALAARAFGADYVANLLHQIASPREPQPPLQLRDPELNQLTTDPLSLLDYDAFILKDRKESTDDSGRETDSTSPDDHGPETGDDDQGSGQPKS

SEQ ID NO: 342 - protein, 513 aa, synthetic construct
VQDLRELLRHLQTTANDSAVQRATGLNRRTIARYRAWATQHDLLDPAQALPPLEALQLLVSTTLAVPPPPQICSSVDAHRALVLQLHAQGVEGAAIRLRLQEQVGYTGSLSAIYRFLHRVDPPPLDVAMRVERDPGSEAQVDFGYAGRMFDPVTGQLRKAWAFVMTLAHSRHQYVEFVFDQSLPTWIGLHDRAFRFFAGVPQRVVLDNLKAGITQACFDDPQVQATYRECAEHYGFLLAPCAPRTPEHKGKVEQGGVHYLKRNFLGGRTPTSLTQANADVRTWCLTTAGLRTHGTTKAQPLVRFQTIEQAALRVLPTAPYDLAIWKQAKLHRDSYVVFDQSFYSAPCRLVGQTLWVRGGSQTLRIYTSDYALVATHARAAQPGERLTHPDHLPPAKLPGATWTRAICQTLAAEVGTSTTSVVARLLDDGVIDRHQRVIRILKLRTRVGDARLEAACARALRFDDLTYATLKRMLDQGLEQEPLAVPPPPPSAHTFLRSASELLGHLFGGATWN

SEQ ID NO: 343 - protein, 502 aa, synthetic construct
LPGRHVTDRQMRLFMQFRKSDPAAVAAAKAGISPATAYRLEKDPRLPSQKKAPRARRRPDPLESVWDSEVVLMLKAAPGLRPIGVLEELRRRHPELDAGVRRTLERRIRNWRAIHGSEQEVIFRQEHPPGRMGLSDFCDMRDLGVSVAGVPLEHRLYHFRLPFSGFESAHVVLGGESFVALAEGLQNALWTLGGAPQQHRSDSLSAAFRNLDADAKEDMTRRYEALCAHYGMTPTRNNKGVSHENGSIESAHGHIKAALEDDLLLRGSRDFDDLPAWRKFVDELVGRRNARNAARVDLERAEMKQLPPRKTSDFEEARVTVTSSSAFTLRKVFYTVPSRLIGHKLLVRLYDDRLEVFQGSTHLFDLPRGRPGPGGRHGHVVDYRHVIHSLRRKPMALLNLVYREQLFPRHAYARAFDALLAETGEKAACKIMVGLLALAHERACEAELAVAIEEELDAGRLPNLAALTERFAPKIAAAPDVIVALPELAVYDALASLEGAAA

SEQ ID NO: 344 - protein, 488 aa, synthetic construct
MIDYALYSKIKHLSINDGLTAPQIARELAMDVRTVRKWLDEPQFKSRKSAPRASKLDPFKRDIVRLLEAHPYTAIQIFQRIREQGFTGRYSIVKDYVRKVRPAKSQAFLTLVFAPGECAQVDWGSYGSVNVGGTRRRLSFFVMVLCYSRLMYVEFTVCQTMEHFLGCHQNAFEYFGKVTGKIMVDNLKSAVLKRIVGQAPVFNPKYLDFANHYGFTIAACNVGKGNEKGRVENGVGYVKKNFLAGLDIPDFDAIHPAARHWLDTVANVRIHGETREQPIVRFEKERACLSPLPAQRYDIATVSQVRASSQFRVTLDTNRYSVPAEYAGRRLTLKAFPDRICLYYDNKLIARHPRSYDRRQDIEDPDHPKPLLRWRKKAREQKIVMRFLSLSPKSAQYYQKLEQRRMNPYHHVQKIVALSEIYGPEAVARALEDAFNFQAFSCEYIANLLEQRTRHLPKPGALHLTRREDLLDLTVEPPDMGIYQKEKA

SEQ ID NO: 345 - protein, 498 aa, synthetic construct
MIDQRAIFEIYRLANEGLSMRKIAKTLHLDRKTVTKYLGNPDPKRVPVTRTSKLDPFKDEIERMLKTDPKASAVVIHQRIAELGYNGEMTILRDYLRKIRGKSKKRRSFIRFESPPGEQCQIDWGHFGSIAYGHTKRKVYCMAVIESHSRMLYVQFTHSQRQETLHRCLLNAFRFFRGTPKELVHDNMLTAVIERDGSLIRFNEAFLAFLRPFKIVPRACNVASPHEKGKVEKGAIHYIRYNFWPLRSFKNLEQLQAQANQWRDQTANKRLHATTGQRPIDRFKPEALRPLPEFLPDCRDSQQLKVHPDFAIRFDANTYTVPPWAIGKQVVAKADNRKLTVYLKEKPIATHLRSWHRKQRIELPAHREAARKQQRRIWVSQEVAAFISLGEAAKTYLERIAESSQPLKKNLKRLLALKDEYGSYALVEAIKRATLHNAYGAHYIENILYQEMTPQRHHPPVNLKKEHLNRIRLKEPCLAEYDSLVVKRRKNHDPDGSA

SEQ ID NO: 346 - protein, 509 aa, synthetic construct
MEIREMLRRFQQGQSNRSIAKDLRINRKTVDRYRAWAVEQELLEGSLPSLGDLHQLLEETLNNASPPQNTSTVEPYRDLVKKLMKEGVEIAATHERLKERGYTGSYASVYRFVRNLEPCDPDVTVRVETRPGEEAQVDFGYAGKMIDPETGELRKTWAFVMTLSWSRHQYVEFVFDQKVETWLRLHRNAFASFAGVPERVVIDNLKAAIVRACWDDPQVQQSYRECAEHYGFLIAPCRPATPRHKGKVEQGGVHYVKRNFLGGREATTVPQANRDVRRWVNTTAGYRVHGTTKEKPLERFKPEQAALKPLPNTPYDMAVWKQVKLHRDCHLIFEQVYYSAPFRLVGQQLWVRGGTREVQIYTTDYQLVATHTRAGKPGRRVTHLDHMPPHKVPGLILTRETCRQQASEVGPSTRKVVDTLLDHRPEDRLRTAGRLLRLGDRFGHKRLEVACARALRFDDPAYMTIKRILEQGLDAEEVPSRPASSSRSMTFARKAEELVGHVMGSVSWK

SEQ ID NO: 347 - protein, 444 aa, synthetic construct
MSLRLLHQRLRPRFARPETHQHVLLYLQAIMSDIPRKNGWQIAEHARQLRPYGMQRLLSQAVWDQDGVRDDLRTLVCQSLHPPPLLPASEANAQVFPVLVMDESGFPKRGRHSAGVGSQYCGRTGRVENCQVGVFLSYVTALGHGLIDRELYLPEDWCSDLPRRLAAHIPDHVRFATKPDLAQRMVQRAQAAHLPIRWVVADTVYGHSPDLRLFLEEHGYAYAMAVPSIEVVCVQTKAGYRLSDVASIARQVLRAKDWQRLSASQGTKGERLFDWARLPLVDHGEPSGRHWLVFRRCLDSPHELAYYLVWAPPDTPLPTMVQAIGARWCIEEDLEATKDLGLDHYEGRSYLGWYRHITLVLLASAFLVGLCIQDTHHPSPHEEPSPASSLIPLTTSEVRHLLARLIWPAPTSALLICQWSCWRRTHQYWAGYYHRRRREKVGSA

SEQ ID NO: 348 - protein, 513 aa, synthetic construct
LEIAEVVRLLRGGESDRKIVELLGLNRRTVAKYRTWAQEQSVLEGAVLPARKLQELLDRTLPKVVPPQQGSTVADYREEISALRLRGVEIAAIRTRLEERHQRPISYSAIWRMVQQLEPKQPDAVVRVEAKPGSEAQVDFGFAGWVLDPVDGRARKAWVFVLVLAWSRHLYAEVVFDQRLETWLVCHRHAFEYLGGVPERIVLDNLKSAIALSCIHEPMAQRSYRECAEHYGFRIDPNPPLSPWLKGKVEQGGVHYVKRNFLAGRDPELQDELNRKLRTWIEQVAGMRIHGTTRQAPLERFRAVEREALLRVPRDPYDLAVWAKLQVHRDCHVTFEQSDYSAPFALVGQKLWVRGGSRTVELYTASHELVATHDRASAKGMRVTLPTHWPAEKVPGLVLNREDCRVQAANVGPATEEIVERLLAHRPEDRLKVAGRLLRLGTTYGTARLEQACARAEAFGEGEYVAVKRILEGDHEQEPLPAAVRAPTTDAPRAFTFMRPVGEFVAAFMGGLA

SEQ ID NO: 349 - protein, 499 aa, synthetic construct
MPGKRITDHQVHKFKQYRRTLSQTAAAAKVGISERSARRVERSEVLPSQRPERQWRTRPDPLADVWDAEVVPLLQADPQLNGVTLFDELQRRHPGAFAPGVLRTLQRRIRQWRVVYGPEREVYFAQEHPPGHMALSDFTVADDLQIVIGGQAFPHLIYQFALAHSGWRHAQVIVGGESFVSLSNAMQMALWRLGGVPAEHRTDSLSAAFKNLTKEVVDDITRRYEDLCAHYGMTASRCNPGQSHENGSVESRHGSLKVALDQALRLRGSRQFDDQQAYEDFIQVVVNRMNQRVSKAARAEIAILKPLPLRKTSEYEELPARVSKYSVFTIRKALYSAPSQLIGHRILVRQYPSHIEVWQGGQCIIKRPKAVLRPGRTRPSHIDYRDLVGALKMKPGAFARWTLRDEAFPRDVYRLTWERLSQRCPERHACKTIVGLLDLAAQGYEAQLGALLQQLIDQDELPELKDLAERLKPAATAVPEVNIELPELAEYDYLLEATV

SEQ ID NO: 350 - protein, 494 aa, synthetic construct
MIDYETFVKIKTLKDQHVLKCSQIARQLDLDYRTVEKWLDKKHYEQRKSPPRASKLDPFKGQIVRMLETYPYSAVQIFQRIREDNFGGGYTIVKEYVRKVRPPKIKAFLKLSFAPGECAQVDWGSYGSVTVGETRRRLSFFVMVLCYSRMMYVEFTVSQTMEHFLGCHQNAFEWFGAVPGKVMVDNLKSAVLKRIVGKDPVFNPKYLDFANHHGFTIVPCAVGKGNEKGRVESGVGYVKKNFLSGLDIPDFNALNPAAIHWLNTVANVRVHGETGKRPVDRFDRERQAMTKLPPHPYDIASIDQVRASRQFRVALDGNRYSVPAEYAGALLTLKAYPDRICVYHREKMIARHVRTYDRRQDIELADHPKALLAQRRKARDQKIFMRFLSLSDKADAYYRQLEQRRMNPLHHIRQIVALSEIYGDQAVQRAIEDAFAFQAFSCEYIANLLEQRARVLPEPGALHLTRSQDFLEITVEKPDMQIYNKAIKKLKEDS

SEQ ID NO: 351 - protein, 489 aa, synthetic construct
MIDYELFCKIRHLKDHEGLTAHQIAGELAMDPRTVVKWLARERFCQRKAVPRASKLDPFKAEIARLLQAHAFTAAQILMRIREQGYAGGYSIVKDYVRSIRPAKSCAYLTLAFAPGECAQVDWGCYGSVALGNTRRRLSFFVMVLCYSRMLYLEFTVSQSLEHFLACHQNAFHFFGSVPKKIMVDNLKSAVLKRILGRPPVFNPRYLDFANHYGFAIAPCNVGRGNEKGRGENAVGYVKKNFLAGLEIPDFAALGPAARNWLQTVANVRLHGETRKKPVELFEAERPCLLPLAINAFDIATVSQQRASSQFRISCDTNRYSVPAEYAGRALTVKTDPERICVYAQDKLIARHIRSYERYLDFEDPDHPKALLAQRKKARDQKIFMRFIALSPKADLYYRKLAERRLNPQQHVRKIVALSEIYGTDPVARAIEDAFAFEAFSSEYVANLLQQRTRFHKEPGALHLTRREDLLAINLEYPDLSVYERNTDE

SEQ ID NO: 352 - protein, 492 aa, synthetic construct
MIERRTVFEIHRMADEGFSKRKIARALHLDPGTVKKYLRDPNPPRPVFRRPSKLDPFHDEIQGFLQNDPEVSAVVIHQRLKTQGFEGEITILRNYLRKLRPRQKEAFIRFESRPGEQCQLDWGHFDSLTYGTTSRKLYALAVIECYSRMLYLEFTHSQRQETLHRALLNAFQFLGGCPRELVHDNMLTAVIERDGPLVRFNEAFLDFLRPFHVVPIPCNVGQAHEKGKIEKGAIHYIRHNFWPLRCFKDLDDVQTQANKWRDEVANRRVHATTGERPADRFKPESMRPLPNCLPDCRDCAPAKVHSDFSITFDGNTYSLPPWLVGRTVIAKADHKTLSIYFKEKVVATHQRSWGRKERIESPHHSEAARRSRNLKWLSEDTAILMSLGEEAKVYIEHLAATRQPLKKNVEKLLALNDDYGSSALLHAMRRALQHRAFGADYIENILYQEMTPQRIHPPVHIQNREALNRIRLQEPTLADYDALVVKRGSQND

SEQ ID NO: 353 - protein, 494 aa, synthetic construct
MDSRRTHPREAAAAKAGLSVTTGARLEADARLPSQKQSPRGRRRPDPLAAIWDSEIVPMLEAVPGLRPITILGEMLRRHHDLPAGTRRTLERRVRTWQALHGPERDVIFRQDHPPGRQGLSDFTDGNPLGVTIAGVPLVHRLYHFRLAFSGWQHAEVVLGGESYVALAEGLQNALWALGGAPQEHRSDSLSAAFRNLDRDAAEDQTKRYEELCCHYRMTATRNNTGVAHENGSIESSHGHLRTALEQALLLRGSRDFADLSLYRHFVAEIVGRANAGRRRELEIERPLLTSLPPRRTTDFEEDLVTVTRSGGFLLRRVFYTVPSRLIGHRLRVRIYDDRIECFLSGTALLTLPRGRPPQGRALRGRKVHVVDYRHVIHALRRKPQALLNLVYRDQLFPRAAYRHAWDALIAAGPPRTACRVMVGLLALAHERGCEADLAAELDALLAVGKLPDLKALEARFAPARSSLPQVTVALPSATTYDTLLDKDAVGSSS

SEQ ID NO: 354 - protein, 517 aa, synthetic construct
MPGKRKETMEIREMLRRFQRGQSNRSIARDLSVNRKTVDRYRAWAVEQDLLEGPLPPLGDLHKLVEETLNSAAPPQNTSTVEPYRDLVEKLRKEGVEIAATYERLKDRGYSGSYAAVYRFVRHLEPCTPDVTVRVETRPGEEGQVDFGYAGKMIDPETGELRKTWAFVMTLSWSRHQYVEFVFDQKVETWLRLHRNAFAFFGGAPERVVIDNLKAAIVRACWNDPAVQQSYRECAEHYGFLIAPCRPATPRHKGKVEQGGVHYVKRNFLGGREASTITQANRDVRRWVNTTAGYRVHGTTKEKPLERFEMERTALRPLPNTPYDMAVWKQVKLHRDCHLIFEQVYYSAPFRLAGQHLWVRGGTREVHIYTADYQLVATHTRAERPGRRVTHLDHMPPHKVPGLILTRETCRQQASEIGSFTRKVVDELLDHRPEDRLRTAGRLLRLGDRFGHRRLEAACARAWRFDDAAYMTIKRILEQGLDAEELPDRADSPPPAMTFARKAEELVGHLMGGASWR

SEQ ID NO: 355 - protein, 514 aa, synthetic construct
MERIHMNIYKEIIYRLRAGESERSISRDIGISRPTVHKYKIRAEIEGYLDQKRDLPDNEELAESLGPAPEPPKTPSTLETYREKVQNYLDQNLQMTVIYQRLREDYSYEGSYSSVRRFVHHLKPVEKEIFVRVNTEPGEEMQVDFGYVGQIFDPKTKRTRNGYVFVATLGYSRHQYAEIVFDQKVNTWIGLHQRAFVFFEGVPNRVVLDNLKAGVVKALVLDPILGEAYRKLAQHYHFLISPNRPRTPRHKGKVENGVNYVKNNFFAGQQFVDIESANQRLKAWVMETAGVRDHGTTHQAPIKLFHEVEREMLRPLPAEAFELLEIRVAKVHSDCHIVVNGSFYSVPYRLVGEEVEVHVLERVVEIYSQHELVRTHLRAHQKGQWRTEMDDYPPYKAQYLLKTPQYCLKAAARIGTNTHAVIEYLLGDRPLDRLRSVQAILALADSVGDTRLESACARAMYYGDPHYRRIKDILNAALDREPIPNQVLASPKQQSFTFSRTPQEFFGRSKEGAQ

SEQ ID NO: 356 - protein, 497 aa, synthetic construct
MPGKRITDHQVKKYKQHRNQFNQVAAAAKAGISERSARRIDDAQSLPSQRPSRNWRTRADPLSAVWDSEVVPLLKADVKLNAVTLLEELQRRDPGQWDGSVLRTLQRRMRSWRAQFGAERDVYFAQEHPPGRQGLSDFTVADALKVEIDGAAFPHRLYQFALAHSGWRHVTIIDSGESFMALSTGLQAALWALGGVPEEHRTDSLSAAFNNLAEQEELTRRYQDLCSHYGLRATRCNPGQSNENGSIESRHDSLKTALDQALRLRGSRSFDARSDYEAFVQTIVQRMNLRCAKLLVAERAMLKPLPVRRTAEYEEMPARVSKYAIFTLKGVQYSAPSQLIGHRLMVRQYAQHIEGWLGGQCVLRQPRAKPQEGNRPGRSIDYRHLVGALKRKPGAFARWVLRDAAFPRAVYRQTWERLSAQKAEREACKTMVGLLVLAADGHEAQLAQELEQLLEMDQLPDLAALTALLAPPKVEVPAVVVTLPALAIYDGLLEVVR

SEQ ID NO: 357 - protein, 495 aa, synthetic construct
MGTDSKTIEAIHRMSHEQKLPGREIARQLHISRKTIKKYLQNPLAKNTVRKPRSSKLDPFKPVIRELLEQWPRASAVVIGQRIRPLGYAGGRSILQQYLATLRQIQTPPRAYIRIESSPGDCFQIDWGHFGSIDYQGDKRKLYAFCCIECHSRRLYVEFTHSQCFETFVRCHVHAFQFMGGRAKECLYDNLVTAVSEHDGRIVRFNPRFLAFARELGFYPRACNKGAGWEKGKVENSIGYLRKNFWPLRTFTDLADVNSQARQWLEQIANKRIHRETRQIPDERFRPECLGPLPPLIPDYRDTKVPLVHTDSRLHFDGNRYCVHPRYRGSHLTVRADSQSVAIYDHETEIAGYVRCWRRGQILGADRYQKELLEQRPAAERSAAQRRLVLLLGETGESYLRKLAETDRSLSRQIKELLILVRQYGPDAVMAAVGKAQSLGAFGADYIANILMQEQSARELQPLLRLKDPRLNELATDPLSLLEYDALILKSRSES

SEQ ID NO: 358 - protein, 532 aa, synthetic construct
MLSIEQINEIHRLAGGEHWSMRRIARQLRLTPRTVRKYLVTPVPSPVRRPRPSKLDPFKPLISELLEQDPHAPGAVILQRLQAAGYSGSHTILRDHLQRVRVPHSAPRAFLRMEPGPGERFEIDWGHFGVLDYEGDKRKLYAFCLIEAHSRMLYVEFTHSQSFETFARCHQHAFAALHGVSRECWYDNLLTAVAEHDGRLVRFQPRFLAFAREYGFYPHACNPGAGWEKGKVEKGGVAYLRSNFWPLRTFTDLTDVNRQVRQWLDEVASVRLHRETCQRPCDRFRPDTLRPLPALTPDYRDTATVFVYKDLRWHFDANRYCAPPRFLGQHLIAKGDASSVTLYDRQGAEIVRYARCWQRGRTLGGERFQKELLEHRPAALRSEAQQRLLKLLQGVCPAETVEAYLRGLADSDRSLLRQLQELLAQFRAYRPEQVAEALQKALAARAFGADYVANLLHQIASPREPQPPLQLRDPELNQLTTDPLSLLDYDAFILKDRKESTDDSGRETDSTPPDDHGPETGDDDQGSGQPKS

SEQ ID NO: 359 - protein, 413 aa, synthetic construct
VDFGYAGVTVDLRSGAVRKTWVFVMVLAFSRHLYAELVFDQRVETWLSCHAHAFAFFGGVPARVVPDNLKAAVVRASYTEPEAQRAYRECAEHYGFLIDPNPPRSPHLKGKVEQGGVHYVKRNFLAGRCALDSPPQPVDTLNRALRRWCVEVAGRRTHGTTKQQPLERFGTVERPALQPLPPAPYLPAVWKRVTVYRDCYVTLAGAYYSVPYRLVGQSLWLRAGAGTVELYNEQHELVATHDRASAPGERMTHLGQLPPEKVTGLTLTRESCRAQASAIGPATAALVETLLDHRPEDRLRSAGRLLRLARQTSPTRLEQACARAQAYGSADYPSVKRILAAGLERPPQPERAPLVQGTAAPEPKPAHPYTFMRQASEFVLSLLAGHAASGPADAFPTRTAEHVASTSGTGGSR

SEQ ID NO: 360 - protein, 496 aa, synthetic construct
MVMHPQTIEAIYRMSHEQGLSVRQISVQLHVSRKAVRKYLDCPLPKRTARKPRNSKLDPFKPDIRELLEQCPRASSVVIAQRIRPLGYTGGRSILQEYVGMVRRTLKPPRAYVRVESSPGDCFQIDWGHFGALDYQGDKRKLYAFCCIECHSRRLYVEFTHSQCFETFVRCHIHAFQFMGGLARECLYDNLATAVAEHDGRIIRFNPRFLAFAQEMDFYPRACNKAAGWEKGKVECGGVRYVRHNFWPLRTFTDLADVNSQARQWLQEIANKHPHSETRQTPDERFRPDCLRPLPPLIPDCRDTDIARVHKDIRLRFDGNRYCVHPRYVGFHLTIRADSQSVAIYDHDHEVAGYVRCWRRGQTFGAERFEKEMLECRPAAERSSAQRRLVMMLGEAGDSYLRGLAETDRSISRQISELLALVRQYGPESVIAAISKAQSVGAFGADYIANILIQEKSAREMQPLLILKDRRLNELATDPLSLLHYDALILTQRSES

SEQ ID NO: 361 - protein, 494 aa, synthetic construct
MIDQRMIFEIHRLADGGLSPRRIARTLALSRKTVVKYLKDPNPQRPAVDRPSKLDPFKDEIGRMLESAPFVSAVVIRQRLVPLGFDGGITIVKDYVRKVRGAGKRKKAFIRFESAPGEQCQIDWGHFGSMAYGNTKRKVYCLAVIESHSRLLYLEFTHSQRQETLHRCLYNAFCFFHGTPRELVHDNMLTAVIERDGSLIRYNERFLAFLQPFKIIPRACNVASPHEKGKIEKGAIHYIRYNFWPLRSFKDLDDLQAQADHWRDQQANRRLHNTTGERPADRFIPEAMRPLPEFLPDCRDTTTVKVSSDFAVRFDGNAYTVPPWALGKQVTVKADNQKVAVYFKQRTIATHRRSWQRKERIESAAHREAARKHQRRLWHSQEVAALISLGEDAKTYIERLAAARTCLKSNIRRLLALKDDYGAYALVEAMKRAISHSAYGADYIENILYQDMTPQRQHPPVQLKEERLNRIRLQQPCLAEYDAFVAKRRNKDDE

SEQ ID NO: 362 - protein, 494 aa, synthetic construct
MIDQRMIFEIHRLADEGLSPRRIARTLALSRKTVVKYLKDPNPKKPPLTRASKLDPFKDEIDRMLERAPFVSAVVIRQRLAALGFDGGITIVKDYVRKVRGAGKRKKAFIRFESAAGEQCQIDWGHFGSMAYGNTKRKVYCLAVIESHSRLLYLEFTHSQRQETLHRCLYNAFCFFHGTPRELVHDNMVTAVIERDGSLIRYNERFLAFLRPFKIIPRACNVASPHEKGKVEKGAIHYIRYNFWPLRSFKDLDDLQAQADRWRDEQANRRRHNTTGERPVDRFRPEAMRPLPEFLPDCRDTATVKVSSDFAVRFDGNAYTVPPWAVGKQVTVKADNQKVALYFKERSIATHRRSWQRKERIESAAHREAARKHQRRLWHSQEVAALISLGEDAKTYTERLAAARTCLKSNIRRLLALKDEYGAYALVEAMKRAISHSAYGADYIENILYQDMTPQRQHPPVQLKEEHLNRIRLQEPCLAEYDAFVVKRRSKHDE

SEQ ID NO: 363 - protein, 507 aa, synthetic construct
LPGSHITDQQVRLYMNNRKTKSQELAAAKAGISERSARRIDGAATLPSQTPRRYWRSRIDPFAAVWDSEIVPLLKGAPNLMAITLLRKLQDDHPDDYPDGVLRTLQRHVRQWRALEGPAREVFFPQDHAPGHRGLSDFTTMAELRITIAGQPFTHILYHFVLAFSRWEHVEVVEGGESFAALSKGLQNALWQAGGVPREHRTDSLSAAFKNLAAEEDFTVRYTALLDHYDLAGTRNNRGLSHENGSVESSHRYLKQALEQALLVRGHRDFDDRPAYEGFVREAVMRRNRRNAAALRIEREQLRDLPTRRTTDFVEEEGQVTRCSTFTVAGILYSAPSRLIGHRLKVRLYSDRLDCYLAGSLVLTLARGTRSPINGRGRVIDYRHFVEELKRKPQAFKGLVFRDALFPRDAYRRTWEQLELRLTQRQACQTIVALLGMAALDGVEAVLARRLEDLLETGELPDLAQLRAEFAPRKAEVPTVTVEMPAPGAYDALLPSQQEDELAEVAA

SEQ ID NO: 364 - protein, 490 aa, synthetic construct
VAKALGIDRKTVARYRTWATEQGLLEESLPSLSDLQRLVEETLDSSPPPQNESSVEPYREVVTKLCREGVEIAAIHQRLKERGYTGSYSSVYRFVRNLEPRTPDVTVRVETPPGEEAQVDFGYAGRMVDPETGKLRKTWVFVMTLSWSRHQYVEFVFDQKVETWLRLHRNAFAFFGGVPERVVIDNLKAGIIRACWHEPVAQQSYRECAEHYGFLISPCRPRTPRHKGKVEKGGVHYVKRNFLGGREPTTVTQANRDVRRWALTVAGDRVHGTTKERPLERFALERGALRPLPDTPYDMAVWKEVKLHRDCHLVFDQAYYSAPFRLVGQKLWVRGGSREVQIFTQDYQLVATHPRAQRPGRRQTRTDHLPPHKVPGLMLTRAACRQQASEIGPATGEVVEALLDHRPEDRLRTAGRLLRLGDRFGPKRLEAACARALRFDDPAYMTIKRILEQGADLEERPDTDSAPPALTFARPPAELVGHLAGGVSWK

SEQ ID NO: 365 - protein, 507 aa, synthetic construct
MNLLRDLIRRLRCGESQRRIARDLGLARKTVRKYAQLARQQGWLLAGVPFPDDALLQASLGSKAAPPFTPSSVEPYTAVVEHFLAQGVEMTAIYARLRDDHGYTGSYSAVRRFVAHLRPPSSPVTVRVHSAPGEEAQVDFGAVGPLYDPYAGRLRPAYVFVATLSYSRHQYAELVFDQKASTWVALHRRAFEAWQGVPQRIVPDNLKAAVLQALVDDPVLGEAYRRLALHYGFLISPTRPGTPQHKGKVESGVHYVKRNFMAGQTFTDILVANQRLKVWVQEQAGSREHGTTHQPPWRLFVEQERAALQPLPSEPFTLCELKMVKVHPDCHVTLEGSFYSVPYRYCGQRLEAYVYEQWVEIYQGSELVSTHPRCQQSGQWQTRLEHYPQDKAAYLQRTPRFCRQLAATVGPATVQVVEQLLAERPLDHLRAVQGLLKLQETVGQQRLEAACARALYYGDIRYRHIKQILNAALDREPLPTAPPLVVQEHFVFARSADEFFLTEEVPA

SEQ ID NO: 366 - protein, 554 aa, synthetic construct
LRFFAFRGISVHMFIYTHLCIFFNIRKSKESMAGKPVDMSKIKQVLQLSGNGTSNRQISKDLGINKETVNNYVRFFKSDSLTLKEALKMEDPELEARFRAGNPAYTDPRHQTFLDELPRFKESLRHRHVTRLLVWQEYIDRNPDGYRKSQFFYHLKQHLTASKPTTVLRGTYIPGEKLYVDFAGDTLEYIDISTGEAVKVQVFVACLPYTDYAFAMCVPSQRVEDFLYALAKCMEALGGVPKILVTDNLKAAVIKADRYEPTLNKALEDMGNHYHFVTIPCRPYSPTHKGMVENQVKIVYHRVYAKLRNRTFHSIEELNEAVTQKMLEHNQTRMQQHPYSREEQFFAAEKDKLSPLPDQPYEMKFSSNLKVRGDGFVYMTRDNHSYSVPYIHIGKQSHIIYTRSLVKIFIDGELVATHQRCHGNGHTYKKEHLASNSDAFLSRSPQYYADEAGQKSDVFKQLVTDMFDDLKHRQVPPEFKYKTCDYMLSISRKAPMKEFEQACHIAIQNRTYSGKFLLKMIEKLKAEKLLFQETDQLNPLPTNHENMRGCSYFK

SEQ ID NO: 367 - protein, 491 aa, synthetic construct
VIAYETFCKIHDCHDRQGLTIAQTARALGLHPQTVAMWVARSRFEPRRSRPRGSVLDPFKPRITRLLDTHPYSAQQIFQRLREEGYRGGMTILRDYIRRIRPTKRPVYLKLHFAPGECAQVDWGAYGTVAVGNTRRRLSFFVMVLAFSRQMFVEFTVSQTMEHFLACHEHGFAALGGVPSKIMVDNLKSAVLQRLAGAAPVFNPRYLDFARHHGFAIEACNVARGNEKGRVESGVGYVKKNFLHGLELTDFSTIHAAAQVWLDTIANVRIHGETQQRPVDLLAQERPHLGPLNPHPYDIALTSTSVASSQFRITLDTNQYSVPAAYAHRRLTVKAYPDRVCIYFDNQLIARHTRRYGRHEDFEEPDHAKGLIAQRSRAREQRLMMRFLALSPDATAYCDGLEQRRLNARHHVRKILALAEIYPADAVARAISDGLAFQAFSAEYITNILETRARALPEPGPLQLTRRHDLLDIDIAPPDLNAYEINDHDPD

SEQ ID NO: 368 - protein, 505 aa, synthetic construct
MKHSQHITVEQAQPSLGEMGHWLESLFHLHQRLRPRFARPEVHQHVLLYLQAILSDIPRKNGWQIAEHARQGRPYGMQRLLSRAVWDQDGVRDDLRALVCQSLHPPALRPVCASHQPFWPVLVIDESCFPKRGRHSAGVAPQYCGRTGRVENCQVGVFLSFVTALGHALIDRELYLPEDWCADLPRRRAAHIPDRVTFRTKPELAKQMLRRAQTAGLLIGWVVADTVYGHSTDLRVFLEKHGYAYALGVPSIEVVCVQTRTGPLLSDVASIAKQALPASDWQRLSQSLGTKGERLFDWALLPIVHAGIVDGRHFLVIRRCLDNPDELAYFLVFAPAETPLSTMVQAIGARWRVEEDLEATKALGLDEYEVRSYLGWYRHLTLVLLAYAFLVSICVQEREASEASGEDLTARSSFSLIALTPSEVRHLLAHLFFPAPTCAPLICQWSLFRRTHQYWAGYYHRRRRQKAGSPLSRASPSLRGKVLAELPGKRPEVFLRENSQEFCLQ

SEQ ID NO: 369 - protein, 508 aa, synthetic construct
MRNRSLPGRHITDRQMRLYMSFRQAETPTVAAAKAGFSAATAYRIEQDQRLPSQKKAPRGRRRRDPLAAVWDSEVVPLLESAPGLRPVAIFDEIRRRHPELGPGIRRTLERRIRTWRALNGAERDVVFRQEPSPGWLGLSDFTDMGDHGIGIAGVPLDHRLYHFRLAFSGWEHAHVVLGGESFVALAEGLQNALWALGQAPLQHRSDSLSAAFRNLDNDTRQDQTRRYEALCAHYRMEPTRNNRGLAHENGSIESPHGHLKRAIEDALLLRGSRDFDTLEAYRRFIDEVVGRRNARNRKRLDLERPALQALPVHRTTDYEETIVTVTSTSGFTLRKVFYSVPSRLIGHRLRVRLYDDRLECFLGGTPLMTLHRGRPHSSGKHGHVVDYRHVIHSLRRKPMALLSLIYREQLFPRRAYRRAFEALLAGEGEKPACRIMVGLLALAHDRACEVELAEAIDAELDAGRLPNLDTLGPRFAPSSAAIPDIIVEVAPLHLYDELGTVKLVGAA

SEQ ID NO: 370 - protein, 518 aa, synthetic construct
MLTTEQINSIHRLHWSEHWSVRKIARHLHLGRRTISQYLVTPARSAARRQRASKLDPFKATIAELLEQDAKASAMVIAQRLRPLGFTGGLSILKDYLHAVRTETAAKRAYVRMEPGPGERFEIDWGHFGALLYQGHARKLYAFCLVECHSRKLFVEFTHSQSFETFVRCHIHAFQFLGGIARELWYDNLATAVAEHDGNLVRFHPRFLAFAREYSFLPRACHVRAAWEKGKIERAVGYLRQNFWPLRTFADLTDVNSQVRRWLEQVANQRRHRETGETPEARFQPETLRALPVIVPDYRDTAEALVHKDLRLSFDGNRYCVPPRYVGRRLTIKADASSVTIYDQYQEIVSYARCWQRGQTLGAERFQKELLAQLTAAQRSAEQQRLVSWLGPASESYLRRLADTDRSLTRQVRELLLLVREYGPDAVAAAVGQAHAAGAFGADYIANLLRQQQMRRDVQPPLRFQNPQLNELATDPLSLADYDSFILRSKKDSDDLTAAETEPTEPGDDEPPSGSDAD

SEQ ID NO: 371 - protein, 518 aa, synthetic construct
MLTTEQINSMHRLHWSEHWSVRKIARHLHLGRRTISQYLATPARSAARRQRASKLDPFKATIAELLQQDANASAMVIAQRLRPLGYTGGLSILKDYLHGVRAQSATQRAYVRMEPGPGERFEIDWGHFGALFYQGHARKLYAFCLVECHSRKLFVEFTHSQSFETFVRCHIHAFQSMTGVARELWYDNLATAVAEHDGNLVRFHPRFLAFAREYSFLPRACHVRAAWEKGKIERAVQYLRQNFWPLRTFRDLLDVNLQARHWLEQVANQRRHRETGETPAARFQSETLRALPVIVPDYRDTAEALVHKDLRLSFDGNRYCVPPRFVGRHLTVKADASAVTLYDQYQEIVSYARCWQRGQTLGAERFQKELLAQFAAAQRSAEQQRLVSLLGPASESYLRRLADSDRSLTRQVRELLLLVREYGPQAVATAMTQAHAAGAFGADYIANLLRQQRMRRDVQPPLRFQNPQLNALATDPLSLADYDSFILRSKKDSDDLTATETPATESGDDEPSSGSDPD

SEQ ID NO: 372 - protein, 518 aa, synthetic construct
MLTTEQINSIHRLHWSEHWSVRKIARHLHLGRRTISQYLATPARSAARRQRASKLDPFKATIAELLQQDANASAMVIAQRLRPLGYTGGLSILKDYLHGVRAQSATQRAYVRMEPGPGERFEIDWGHFGALFYQGHARKLYAFCLVECHSRKLFVEFTHSQSFETFVRCHIHAFQSMTGVARELWYDNLATAVAEHDGNLVRFHPRFLAFAREYSFLPRACHVRAAWEKGKIERAVQYLRQNFWPLRTFRDLLDVNLQARHWLEQVANQRRHRETGETPAARFQSETLRALPVIVPDYRDTAEALVHKDLRLSFDGNRYCVPPRFVGRHLTVKADASAVTLYDQYQEIVSYARCWQRGQTLGAERFQKELLAQFAAAQRSAEQQRLVSLLGPASESYLRRLADSDRSLTRQVRELLLLVREYGPQAVATAMTQAHAAGAFGADYIANLLRQQRMRRDVQPPLRFQNPQLNALATDPLSLADYDSFILRSKKDSDDLTATETPATESGDDEPSSGSDPD

SEQ ID NO: 373 - protein, 492 aa, synthetic construct
MIDEKTIFEIHRLKDEGHSYRRIAAILGISRESAAKYHKSPDIRHTKRKKKPSKLDGFTDFIDEMLAEYTDVSAVVVLQKLRQKGYKGQLTIVRDYLRQKRQRQKTRQAFIRFESEPGQQMQVDWGHFDSIDYEGDKRKLYGLAVVESYSRRLYVQFTHSQKQEVLHQCLFNAFCYFKGTPSELLVDNMVTAVIERSGKVIRFNDAFLKFLRPFKILPRACNKAAPWEKGKVEKSIGYIRKNFIPLRQFKNLEDINNQVLRWLDEIANCRIHQTTGKKPDDLAAGLPLRPIPFEEQTSYPETALVKVHRDYAIRFDRNTYTVPPWCIDKELTLKADQSEIRLFHKTRKIVAHKRCWRKRQRIEHPAHTEEALKRKRKAIESSEIGIFSALGEEFREFLGGLNQTDQPVKKSIRRLLELKDQYGTGSLSWAVLKAIRHGAFGADYIENILYQEMTPQTKHLPVQTKDEALNRIRLSEPSLAEYDAIIIKGAKQ

SEQ ID NO: 374 - protein, 489 aa, synthetic construct
MIDYELFCKLRHLKEQEGLTAHQIAGELAMDPRTVAKWLARTRFCQRKASVRSSKLDPFKNQIARMLEAHAFTAAQILVRLREQGFDGGYSILKDFVRGIRPPKSPAYLTLAFAPGECAQVDWGSYGSVAVGDTRRRLSFFVMVLCYSRMLYCEFTVSQSMEHFLCCHKNAFDFFGCVPKKIMVDNLKSAVLRRILGRPPVYNPKYLDFANHCGFTIAACNVGRGNEKGRVENAVGYVKKNFLAGLEIPDFAAIAPAARNWLETVANVRIHGETRKKPLELFEAERPCLLPLPINDFDIATVNPQRASSQFRITLDTNRYSVPAEYAGRALTVKTDPERICVYCADNLIARHVRSYDRDQDFEDPDHPKALLAQRKKARDQKIFMRFLSLSPKADLYYRKLEERRMNPQVHVRKIVALSEIYGHEPLARAIEDAFLFEAFSCEYIENILQQRTRYHKEPAALHLTRREDLLDITLEHPDLSVYERMNDD

SEQ ID NO: 375 - protein, 488 aa, synthetic construct
MIDYETYCKIRKLHQETGGSFNKIGEELGIDPETVAKYVRAEKFAPRAGKKRSSKLDAFKPMITRLLDRHPYSVTQILGRLREEGYEGGLSILKEYVGVVRPVRHPAFLSLAFEPGEAAQVDWGSAGTIQIGNTRRRLSFFVMVLCHSRMAYVEFTCGEGMEHFLTCHRKALEYFGATPSAIIIDNLKTGVLRHRFGEKAIFHPRYLDLAAHYGFEPRACNVRKANEKGRVENGVGYVRKNFLAGLEIPPGLSAINAGVLHWLSNVANVRIHAATRKTPLELFQIEKPAMRPLPDEGADTSVTKPACRVNNLCRVTLDTNHYTVPFRYASKQLTLVLFPDRLCLYDGAALVASHSRSYERHRDFEDPDHVRELLDQRRRAHAAKWLQRFYALSPQAEHYHQQLGARSLNARSHINKIVALSDIYGADKVARAIDDAIASQAFASQYIENILQQRERHTPLPGPLHLTRRSDLLDLELSPADLSLYDNP

SEQ ID NO: 376 - protein, 490 aa, synthetic construct
MIDYELFCKIRHLKEQEGLNAHQIAGELAMDPRTVAKWLTRERFCPRKASPRSSKIDPFKNEIARMLQTHAFTAAQILVRIRGQGFAGGYSIVKDYVRSIRPPKSPAYLTLAFAPGECAQVDWGCYGSVAVGNTRRRLSFFVMVLCYSRMLYCEFTVSQSMEHFLACHKNAFDFFGCAPKKIMVDNLKSAVLRRILGRAPVFNPKYLDFANHCGFTIAACNVGRGNEKGRVENAVGYVKKNFLAGLEIPDFAAIAPAARNWLETVANVRIHGETRKKPVELFEAERPCLLPLPINDFDIATVCPQRASSQFRITLDTNRYSVPAEYAGRSLTVKTDPERICVYASEKLIARHIRSYERYQDFEDPDHPKALLAQRKKARDQKIFMRFISLSPKADLYYRKLQERRLNPREHVRKIVALSEIYGHEPIARAIEDAFVFEAFSCEYIANLLQQRARFHKEPAALHLTRREDLLDITLEHPDLSIYDERNTDV

SEQ ID NO: 377 - protein, 491 aa, synthetic construct
MIDRRTVFEIHRLFHEGYGIRKIARTLKRSRDSVKRYLDQPNPPKPVIIRASKLDPFREEIQRLLEKDPTVSSAVLFQRLIPQGYTGRSSILRDYLQKIRPKEKRAYIRFESALGKQFQADWGHFGSLLYGQTPRKLYCLAIIEAHSRLLYGEFTHSQKQEALHQALLNAFLFFEGVCSELVVDNMGTAVTEREGSLIRFNEAFLEFLRPFRIVPRACHPYQPQEKGKIEKGGIHYIRYNFWPLRSFTDLTDVNQQFRHWLDNQANIRVHSTTGERPKDRFKSEALQRLPDFLPDCRETLSVKVQADFAFRFDGNSYSVPPWAVGKPVIVKADAQTVTVYLREKVLATHTRCWEKKQRIELPAHREAAWKRRPQEWLAVEVSRFISFGEEAQAFLEGLNRTGQPIKKNLAKLLALHDQYGTADLIQALSRANAHNAYGASYVENILHQEKHPKKIHPPLHLKQREDLNRIRLEEPLLAEYDALILKRKDLS

SEQ ID NO: 378 - protein, 488 aa, synthetic construct
MIDRRTVFEIHRLFHEGYGIRKIARTLKRSRDSVKRYLDQPNPPKPEIVRASKLDPFREEIQRLLEKDPTVSSTVLFQRLLPQGYTGKTSILRDYLQKIRPKEKRAYIRFESALGKQFQVDWGHFGSLLYGKTPRKLYCLAIIEAHSRLLYGEFTHSQKQEALHQALLNAFLFFGGVCSELVVDNMGTAVTEREGSLIRFNEAFLEFLRPFRIVPRACHPYQPQEKGKIEKGGIHYIRYNFWPLRSFTDLLDVNQQFRHWLDTQANIRIHNTTGERPQDRFQPEALQPLPDFLPDCRETLSVKVHSDFAIRFDGNSYSVPPWAVGKLVIVKADTQAVTVYLREKVLATHTRCWEKRQRIELPAHREAAWKRRPREWLAVEVSRFLSFGEEAQAFLEGLNRTGQPIKKNLAKLLALHDQYGTADLIQALSRANVHNAYGASYVENILHQEKHPKKIHPPVHLKREDLNRIRLEEPLLAEYDALILKRKE

SEQ ID NO: 379 - protein, 489 aa, synthetic construct
MTGYETYARIGALTRQGLTPAQIAADCGLDERTVRLWQGRAAYRPRSSPKRASKLDAHRQTVARHLAEHPYSAAQLLGKLREDGYTGGYGILKALVRQARPPRHAAYLPLAFAPGECAQVDWGCAGTLLVDGARRRLSFFVMVLCHSRMLYLEFTLLERQEQFLECHQNAFLRFGGSPRRVMVDNLKSAVLSHPRGLPAVYHPRYLDFAAHYGFEPRACGPRRANEKGRVENAVGYVKKNFLAGLELTSLAAVQAAGRAWADGVANRRLHAATRRRPDEMFAEEGLLPLPASGAYDTGAGREAVATSLFRVHFDGNRYSVPARHAGTRVSLRAYADRVLVYGPDRRLIASHARAYGRGLDIADPDHGCELVRQRRQARDQHTLQRFLSLCGESADYYRQLSERRANPFEHVRRVAALAEIYGQEKTARALRDAAELGAYSSEYVANLLEQRGRLRPEPGALHVTRGADLLELELPETDLSIYEQGSENQ

SEQ ID NO: 380 - protein, 518 aa, synthetic construct
MLTTEQINSIHRLHWSEHWSVRKIARHLHLGRRTISQYLATPARSAARRQRASKLDPFKATIAELLQQDANASAMVIAQRLRPLGYTGGLSILKDYLHGVRAQSATQRAYVRMEPGPGERFEIDWGHFGALFYQGHARKLYAFCLVECHSRKLFVEFTHSQSFETFVRCHIHAFQSMTGVARELWYDNLATAVAEHDGNLVRFHPRFLAFAREYSFLPRACHVRAAWEKGKIERAVQYLRQNFWPLRTFRDLLDVNLQARHWLEQVANQRRHRETGETPAARFQSETLRALPVIVPDYRDTAEALVHKDLRLSFDGNRYCVPPRYVGRHLTVKADASAVTLYDQYQEIVSYARCWQRGQTLGAERFQKELLAQFAAAQRSAEQQRLVSLLGPASESYLRRLADSDRSLTRQVRELLLLVREYGPQAVATAMTQAHAAGAFGADYIANLLRQQRMRRDVQPPLRFQNPQLNALATDPLSLADYDSFILRSKKDSDDLTATETPATESGDDEPSSGSDPD

SEQ ID NO: 381 - protein, 492 aa, synthetic construct
MLSQRLIFEIHRLSYEGFSLRKIAALLGLSRQVVTKYLRDPAPPTALRPRPSKLDPFRSQIGQFLEIDPAVSGQVILQRLGALGFDGGYTILKDYLRTVRSPRKKTAFIRFESAPGEQCQVDWGHFGVIPYGNTARKLYCLGVIESHSRMLYLEFTHSQGQQALHRGLLNAFRFFGGSPKKLVHDNMKSAVIEREGPLTRFNDAFLAFLRPFKVVPVACNPGQAHEKGKVEKGAMHYIRYNFLPLRSFTNLDDLQAQANQWRDETANTRIHSTTGERPCDRLRKEAMIPLPEFLPDCRDAAQLRVYADFAVHFDGNWYTVPPWAVGRKVSVKADNRTVTVYFKDRPIATHKRSWMRKQRLEMPEHREAARRHKEKYWLSEAAAALLSLGEEVKVYLEELAATGQPLKRSMKKLLALESDYGAQAFIEAIRHATAHRAFGVGYIENILIQNKTPKREHPPVTLSREPLNHIRLIEPSLAEYDALVIKRRKGDR

SEQ ID NO: 382 - protein, 535 aa, synthetic construct
VYQGWRHGGIVAHSSRTNLEEDLMERLHMHYVRDLIYRLRQGESERRIARDLRISRTTVRRYRELADEKGWLVAGSSLPDDAALADALGPPPQPPRTPSTLEPFAEVVQALLAQGVEMTALWQRLRQDHGYTGSYSSVRRFVHRLQPAEPRVVVRVHTAPGEEAQVDFGPIGMLYDARQKRLRPAFVFVATLSYSRHQYAEIVFDQKTPTWIALHRRAFESWGGVPQRIVPDNLKAAVIQALVYDPILGEAYRRMAQYYGFLISPTRPGTPQHKGKVENGIHYFQRNFMAGQDFADSDVANQRAAVWVREVAGTRLHGTTHAPPLQLFKDHEQAALLPLPSQAFTLNAIKQAKVHADCHVTLDGSYYSAPYRFVGQVLDVHIGERTVQLFDGQTLVATHVRAEQSGQWLTRPEHYPAEKAAYLERTPERCRQIADQIGPRTRALIDGLLDERPLDRLRSVQAILRLEETVGRERLEAACTRALHFGAAHLRGIKGILQADLDRETLPEETSAAPPRSYQYARQATEFFAQQAAAC

SEQ ID NO: 383 - protein, 492 aa, synthetic construct
MIERRVIFEIHRMADSGLSIRRIAKALHLDRETVSKYLADPNPARATVVKPSKLDPFKDQIQELLEKDREVSATVIHQRLKARGFEGEISILRDHLRKVRPKPKEAFIRFESEPGVQVQLDWGHFGSLSYGTTLRKLYVLAAIECHSRMLYLELTHSQRQETLHRTLLNAFRFFEGTPAQLVHDNMLTAVTERDGPLVRFNDAFLDFLRPFHVVPIPCNVGQAHEKGKVEKGAIHYIRHNFWPLRCFKDLQDVQDQAKDWRDEVANRRVHATTGERPVDRFKPEAMRPLPDMLPDCRDASPAKVHSDFSINFDGNTYSVPPWLVGRSVMARADHKTLTVYFKEKAVATHQRSWTRKERIESPHHVDAARRSRNLKWLSEDTATLMSLGEEAKVYIEHLAATRAPLKKNVQKLLALKDEYGSSALLDAMRRALKHRAYGADYIENILYQDMTPKRIHPPVRIQNREALNRIRLQEPNLADYDATALKRRNHHD

SEQ ID NO: 384 - protein, 528 aa, synthetic construct
MLTTEQINDLHRLYWSDHWPIRKIERHLHMGWETIKKYLDMPAQTPAGRPRSSKLDPYKATIAELLEKDPSASAAVIGQRLQPLGYTGGGSILRQYVHEVRPQSKPQRAFVRMEPKPGERFEVDWGHFESLDYQGDQRKLYAFALVDGHSRMQYLEFTHSQSFETFVRCHVHAFQMLNGIARELWYDNLATAVAEHDGRLVRFNPRFLAFAREFNFYPRACNQASGWEKGKVERSGIGYVRQNFWPLRDFLDLHDVNRQAREWLDQIANRRLHSETRERPIDRFQPDALRCLPVITPDYRDTVAALVYKDIRLQFDGNLYCVPHRFAGRRLTLKADSSSVTIYDRVTEIVSYARSWRRGQTLGAERFEAELAEFRPAARRSRAQDRLFAFLDGLCSKAELEAYLRDIADGDRSLSRQITELLELIRQYGPDAVAGAIEKAATARAFGAGPRGYPVANILRQQQSPRREQPPLRLRDPRLNELVTDPLSLLAYDAFILKSEKESDDPPGTETPRSESDGHEPPSGDDPL

SEQ ID NO: 385 - protein, 492 aa, synthetic construct
MRLRTDHPQMTAAAKAGLSVASARRIDLDPRPPSTKKQWRTWRTRPDPLDGVWNEEILPLLVAAPGLRPITLFDEMERRHPDRIGPSFRRTLERRIADWKALHGADRDVIFPQTQQPGRMGLSDFTDANGFGVIVGGQKLEHRLYHFALAFSGFEHAEVILGGESYAALASGLENALRLLGGVPLEHRSDSLSAAFRNLARPDVEDLTRRFAALVAHYGMVPTRNNRGVAHENGAIESRHGHVKTRVVQALLLRGSPMFDDLEAYRAFISGVIGQHNRRHAAMIDAERAVLRPLPVAPAMTWEAMTVRVTSASGFMCHHVFYTVPSRLVGHRLHLRIHDDRIEAYLGGSFVLTLPRGRRGKGAGAVHVVDYHHIVAALRAKPGALTHLAYRDALWPRTAYRRAWEALIAAGSARDAARTMVGLLALAHERGVEADLATAIDAGLDAGELPDLATMLRRFTPVAAAAPEVLVILPPLATFDRLIALAASEVMS

SEQ ID NO: 386 - protein, 506 aa, synthetic construct
MIDYQLYCKIKDRHQNQHLTVAQIAHELHLDQRTVARWVAADKFHRRKSSPRASKLDAFQGQIVRWLAVHPYSATQIFLRLRESGYAGGITIVRDYVHQVRPPRSPAFLTLAFAPGECAQVDWGQFGSVPVGNTTRRLSFFVMVLCYSRMMYVQFTPSETMEHFLDAHVNAFTFFGGVPSRCMVDNLKSAVLQRAIGEAPVFNPRYKDFADHFGFTIAPCGVGQAHEKGRVENAVGYIKKNFLAGLEVSDFSHLNPAARQWLDSVANVRLHGSTKRQPVELFAAERPSLKPLPARPYDLGVILPVRANSQFRVRVDTNTYSVPAAYAGAALTLKLYPDHLCLYHQDKLIARHLRRYDRHQDVEDPDHPRALLQQRRRASDQKLLLRLLSLTPKAEAFYQGLSERRLNVLHHVRKIVALSEIYGPERTARAIQDALEFGAFSCEYIANLLEQRQRLLPEPGALHLTRRQDLLDLELPEPNLGLYGTDSLPTPGDNHEPGQERQTDAG

SEQ ID NO: 387 - protein, 489 aa, synthetic construct
MIDYETYVRIRNYFRNDGLKYSQIADELGLDCRTVAKWANEARYLPRRSAKRASKLDPFKNEIVRMLERHPYTARQIFQRLQEGGFDGGITILTDYVRKIRPPKVTPYLKLVFAPGECAQVDWGTYGNVRVGSTSRRLSFFIMVLCHSRMMYVEFTVSQTMEHFLGCHQNAFHFFGSVPQKIMVDNLKSAVLKRTIGKDPVFNPRYMDFANHYGFKIVPCNVGKGNEKGIVENAVGYVKKNLLNGLTITDFKIMKPLVQHWLDKVANVRNHGETGKRPVDMFTEEKPSLQPLPIEPYDIGVVKQARASRQFRVTIDTNRYSVPAQLAGVGLTLKLYPDRLCFYHENKLVARHVRSYDRRQDYEHPDHPKVLLAQRKKARDQKIFMRFLSLSNKAQEYYRQMEQRRMNPFHHIRQIVALSEIYPPEQVTRAIEDAFHFKAFSCDYIANLLEQRSRQVKEPGALHLTRSSDLLDLTINKPDLSIYDIGGEK

SEQ ID NO: 388 - protein, 524 aa, synthetic construct
MLTTEQINDLHRLYWSDHWPIRKIERHLHMGWDTIKKYLDMPAQTPAGRPRSSKLDPYKATIAELLEKDPSASAAVIGQRLRPLGFTGGGSILRQYVHEVRPQLKPQRAFVRMEPKPGERFEADWGHFDSLDYQGDQRKLYAFALVDGHSRMQYLEFTHSQSFETFVRCHVHAFQMLNGIAREVWYDNLATAVAEHDGRLVRFNPRFLAFAREFNFYPRACNQASGWEKGKVERGGIGYVRQNFWPLRDFLDLHDVNRQAREWLDQIANRRLHSETRERPIDRFQPDALRCLPVITPDYRDAVEALVHKDMRLQFDGNRYCVPHRFAGRRLTLKADSSSVTIYDRVHEIVSYARSWRRGQTFGAERFEAELAEFRPAARRSRAQDRLFAFLDGLCSKAALEAYLRDIADSDRSLSRQITELLELIRQYGPDAVAGAIEKAATARAFGADYVANILRQQQCPRREQPPLRLRDPRLNELVTDPLSLLAYDAFILQSEKESDDTPGTKTPRSESDGHEPPSGDDPL

SEQ ID NO: 389 - protein, 506 aa, synthetic construct
VIEEIETSRMPGKKITDHQVLKYKEHRNKLTQSAAAAKAGISERSARRVEGSDALPSQRQPRSWRTRQDPLADVWDAEVVPLLRADAQLNAVTLLEELQRRYPGAYGAGVLRTLQRRMRQWRAMHGAEREVFFAQEHPPGRLGLSDFTVADDLGVEIEGAAFDHRLYQFALAHSGWRHAVVMAGGESFLALSTGLQAALWRLGGVPEEHRTDSLSAAFNNLAEQQELTRRYADLCRHYGMRASRCNPGQSHENGSIESRHDSLKTAIDQALRLRGSRGFDDRAGYETFVDQVVQRFNARAAKRLAVERAMLKPLPPRRTAEYEELPARVSKYAIFTVKGAQYSAPSQLIGHQLMVRQYAQHIECWLGGQCVLQRPRATHRDGQRHPRDIDYRHLVAALKRKPGAFARWVLRDAVFPRVVYRQTWERLAAALPEREACKTIVGLLVLAADGHEAQLADELEQLIELDQLPDLNALTALLTPPRRELPDVAVELPTLADYDELIEVTR

SEQ ID NO: 390 - protein, 492 aa, synthetic construct
MRLFMKYRNSNPACVAGAKAGFSPATAYRLDKDPRLPSHQQTPRGRRRADPLADVWQSEVIVMLEAAPGLRPVAIFEELCRRHPDLGAGTRRTLERRIRSWRAVNGPDREVIFRQEHPPGRMGLSDFTEVADLGVTIAGQVLDSRLYHFRLPFSGFEHAHVVLGGESFVALAEGLQNALWALGGAPEQHRSDSLSAAFRNLDADAKADLTKRYEAFCAHYGMIPTRNNPGVSHENGSIESSHGHLKSKLADALLLRGSRDFDDLPAWRGFVDEIVARGNVRNAKRIDQERMALKELPARKTVDYEEVNVEVTSSSAFTLRKVFYSVPSRLIGHRLRVRLYDDRLECFQGSTPVLNLRRGRLEPNGKRGHVVDYRHVIHSLRRKPMALLNLVYRDQLFPRRAFASAFEALLAASGERLACRAMVGILALAHERACEGELALALQAALDDGVLPDLAALIERFRPKDAELPVVIVTLPSLAIYDRITTSVGEAA

SEQ ID NO: 391 - protein, 492 aa, synthetic construct
MRLRTDHPQMTAAAKAGLSVASARRIDLDPRPPSTKKQWRTWRTRPDPLDGVWNEEILPLLVAAPGLRPITLFDEMERRHPDRIGPSFRRTLERRIADWKALHGADRDVIFPQTQQPGRMGLSDFTDANGFGVIVGGQKLEHRLYHFALAFSGFEHAEVILGGESYAALASGLENALRLLGGVPLEHRSDSLSAAFRNLARPDVEDLTRRFAALVAHYGMVPTRNNRGVAHENGAIESRHGHVKTRVAQALLLRGSPMFDDLEAYRAFISGVIGQHNRRHAPMIDAERAVLRPLPVAPAMTWEAMTVRVTSASGFMCHHVFYTVPSRLVGHRLHLRIHDDRIEAYLGGSFVLTLPRGRRGKGAGAVHVVDYHHIVAALRAKPGALANLAYRDALWPRTAYRRAWEALIAAGSARDAARTMVGLLALAHERGVEADLATAIDAGLDAGELPDLAMMLRRFTPVAAAAPEVLVILPPLATFDRLIALAASEVMS

SEQ ID NO: 392 - protein, 491 aa, synthetic construct
MIDYPTFHRLRQLHDEEHLSVAQIAQALALDERTVGKWIAVEKYQPRQAAKRPGKLDPFKNTLVRLLAQHPYTAQQLLQRLKEGGYTGGYSILKEFVQQVRPAAAPAFLTLHFAPGRSAQVDWGDAGVLPVGHTRRRLSFFVMVLCYSRRLYVEFTLAQTQEHFLACHQHAFEYFHGVTAEIMVDNCKTAILSHPYGQPAVPHPRYLDFARHYGFTIKACGPKKPHEKGRVEKSVHYVKQNFLAGLQLAGLEAINAAARRWLDETANVRVHGETHQTPQQLFLAEQPALQPLTVNPYAAATLQTVLVSQRCRVTFDANRYSVPPAYAGKTLVLKVYPARLVLYHQDRVIAEHVRSYDRHQDFEKPEHVEELLAQRRQARQQQHLTRFLALSPKAREYYQRLEEKRGNPRHHVQKIVALSEIYGVEKVRRALEDALAYQAFSCEYIANILEQRERPVTQPGALHLTRQQDLLDLDLPAPDLSLYESEEGGAP

SEQ ID NO: 393 - protein, 523 aa, synthetic construct
MLTSDQINELHRLYVSEKWPIRKIERHLNMGWRTIRKYLEAPAQGAAPRQRQSKLDSFKPLIAECLEKDPRVTAALILQRIKDLGYGGGHAILQEYVRKVRPRPASKRAFVRMEPFAGERFEVDWAHFDVLNYSGDIRKLYAFALIDAHSRMLYVEFTHSQSFETFARCHVHAFHALQGVAREIVYDNLATAVAEHDGRLVRFLPRFLGFARDYNFFPRACNPASGWEKGKVERSIGYLRQSFWPLREFKDLQDVNRQVRQWLAEVANQRLHRETRERPAERFKPEALRPLPIIPYDYRDTAEALVHKDLRLQFDGNKYCVPHRYVGQRLTVKADAGAVTIYERVTEVVSYPRSWRRGQTFGAERFEKLLAEQRPAARRSQAQQRLIDSLDGLCSRQLLEAYLRDLADMDRSLARQISELLELIRQYGPDVVASAIEKASAARALGADYVANIVRQQQSPRRPQPPVPLRDPQLRDLVTDPLSLLAYDAFILDSGKDNHDLPGTETAAAELGSDEPSDRTDDC

SEQ ID NO: 394 - protein, 468 aa, synthetic construct
MKSSHSTTSKHAEQILRKVSHWPARLHELHQRLRPHFARPEAFEHALLYLQAILSDIPRKNGWQIAEQARQARPYGMQRLLSSAVWDEDGVRDDLRTVVCQTLCPPPVFSEQEKARAPFPVLVLDESCFPKRGRHSAGVAPQYCGRTGRVENCQAGVFLSYVTALGHALIDRELYLPEDWCADMPRRHAAHIPDRLTFRTKPELAKQMLRRAQAAGLSIGWVVADTVYGHSTDLRVYLEEQGYPYAVGVPSIEVVCVQTRTGLLLSTVASIAKQALRAGDWQCLSQSLGTKGERLFDWARLPVVHAGTMDGCHWLVFRRCLDNPDEVAYFLVFAPPETPLSTMVQAIGARWHIEEDLEASKGFGLDHYEVRSYLGWYRHITLVMLVSAFLLTICVQECQASQASGENLTARPSFSLIALTSSEVQHLLAHLFFPAPTCWPLICQWSLFRRAHQYWAGYYHRRRRQKAG

SEQ ID NO: 395 - protein, 405 aa, synthetic construct
RTLERRIRAWRAKHGPEQEVIFRQTHVPGKMGLSDFTDMNKHGVSVAGQPLEHRLYHFRLAYSGFGHAHVVLGGESYVALAEGLQNALWSLGGVPAEHRTDSLSAAFKNMEQSTQEDLTDRMDALCNHYGMTPSRNTKGVAHENGAIEGPHGHLKRAIADALIMRGSHDFEDLEAYRRFIDEVVGRINARNAKRIDVERASLSPLPARRTTDCEEVTVRVTSSGGFLLRKVFYTVPSRLIGHQLRVRIYDDRLDLLLGATFLVTLPRARVTRHGPHRHVVNYHHVIHSLRKKPMALMGLVYRDQLFPRQAFRDMFAVMLERATERLACRMMVDLLALAHDRGCEAELAAQLEEDLRQKRLPDIAALTALFAPLRGSLPGVEVQLADLSVYDQLLGNTPMTQEVAA

SEQ ID NO: 396 - protein, 493 aa, synthetic construct
MIDYETYVQIRNYFERDGLNYGQIAAALDLDQRTVARWANEKRYQSRKSPARKSKLDPFKNDILRMIEKHPYSTAQIVQRIREMGFTGGKTIVADYVQRVRPPKTKAYLKLVFAPGECAQVDWGSYGAVRVGSTSRRLSFFVMVLCHSRMMYIEFTVSQTMEHFLGCHQNAFHFFGSVPQKIMVDNLKSAVLKRIMGRDPLFNPKYLDFADHYGFSIAACNVGKGNEKGIVENAVGYAKKNLLNGLDIPDFKIMKPMARQWLDTVANVRTHGETGKRPVDMFAEEKRSLQPLPVEPYDIGVIKQMRASRQFRVTIDTNHYSVPAQLAGVHLTAKMYPDRICLYHENKLVARHVRSYDRRQDFEHPDHPKVLLAQRKKAKDQKIFMRFLALSAKSQEYYRQMEQRRMNPFHHIRQIVALSEIYSKEQVAMAIEDAFSFSAFSCEYIANLLEQRSRPVKEPGALHLTRSSDLLDLTIDYPDLSIYNFAIDEDDNE

SEQ ID NO: 397 - protein, 491 aa, synthetic construct
MIDRRTVFEIHRLFHEGYGIRKIARALRISRDSVKRYLDQPNPPKPLLVRSSKLDPFREEIRRLLEKDPTVSSAVLFQRLIPQGYTGKTSILREYLREIRPKEKRAYIRFESGPGQQFQTDWGHFGSLVYGKTTRKLYCLAVIEAHSRLLYGEFTHSQKQEALQQALLNAFVFFQGVCAELVVDNMATAVTEREGSVIRFNDAFLEFLRPFRIVPRACHPYQPQEKGKIEKGGIHYIRYNFWPLRTFTDLLDVNQQFRHWLETQANVRIHSTTGERPRDRFQSEALKPLPDFLPDCRETSSVKVQTDFAIRFDGNSYSVPPWAVSKPVIVKADAHTVTIYSREKILATHTRCWEKRQRIELPAHREAAWKRRPQEWQAVEVSRFISFGEEAKAFLEGLSQTGQSIKKNLRKLLDLHDQYGKADLIQALQRALAYKAYAAAYVENILHQKKTPKKIQPPVQLKQREDLNRIRLEEPLLAEYDALILTRKDKP

SEQ ID NO: 398 - protein, 488 aa, synthetic construct
MIDYAMYCKIRHLKDHDRLNAVQIAEALAMDVRTVRKWLAQKGFAPRTGIRRAGKLDPFKRDIGRMLEAHPYSAMQIYQRISQQGFSGGCTIVKDYVRKVRPPRVRAFLTLAFAPGECAQVDWGSFGTVAVGKTVRRLSFFVMVLCYSRMMYVQFTVSQTMEHFLACHQNAFEYFGAVPKRIMVDNLKSAVLKRIVGQAPVFNPRYLDFAGHYGFDISACNVGKGNEKGRVENGVGYVKKNLLAGLELADFAALEPAARQWLDTVANVRIHGEMREKPTVLLEKERSQLNRLPLHRYDVATVCQVRASSQFRVAIDANRYSVPAEYASRELTAKIGPEWICFYHDNRLIARHGRCYDRHQDIEDPDHPKQLLLWRKKVREQKIVMRFLSLAPRAAGYYQKLEQRRMNPYHHVQKIVALSEIYGIEAVARAMEDAFVFEAFSCEYIANLLEQRTRRLPEPGALHLTRRQDLLELEVESADLSLYQENSP

SEQ ID NO: 399 - protein, 525 aa, synthetic construct
MLTADQINAIHRLHWAEHWSARKIARHLHIGRRTLAKYLETPAPRTATRQRASKLDPFKPTIAEWLTQDPTASAVVIAQRLRPLGFDGGMSILKEHLHAARGQIAAKRAYVRMEPAAGERFEIDWGHFGALLYQGHARKLYAFCLVECHSRKLYVEFTHSQSFETFVRCHLHAFQAMGGVARELWYDNLATAVAEHDGNLVRFHPRFLGFAREYNFLPRACHVRAAWEKGKVERSVGYLRQNFWPLRTFTDLADVNLQVRHWLDEVANRRRHRETGQTPEERFRPEALHLLPAITPDYRDTADALVHKDLRLAFDGNHYCVPPRYVGYWLTVKADASSLVVYDQHQEIVSYARCWQRGEVLGAERFQKELFAQMAAAQRSAAQQRLVRWLGPACELYLQRLADTDRSLARQVRELLELVREYGPETVAIALQKAHAAGAFGADYIGNILRQQQMQREVQPRLRLQDPQLNELATDPLSLADYDTFILHAKKATDDRTATETRSTEPDDHEPATGTDTDGGDGPQS

SEQ ID NO: 400 - protein, 526 aa, synthetic construct
MAGTVKEMSLIKQVLQLKQRGESNRGIARQLPINKETVGGYMQTIEANGWKIEDLLLVDDPVLEGMFHAGSPAYTDERMKEFLRLLPYFREQLSDRRLHVTRQLLYDEYRQTHPDGYGKSQFYEHLKQNLVAQKDITTVLAMTYKAGEKLMVDFAGDKLPYTDPETGEVVKAEVFIGCMPYSDYIFACCVPSQRTEDFLFALRLCLEHLGGVPPIVVPDNLKAAVITPDRHEPVLNKALQDMGNHYGFTVLPCDPGEPTQKALVEDAVRITYNRIAAKLRGRDIVGLLALNKAVEEQNVMLNQTRMQKRPYTREERFHAMEKPQLKPLPEQVFEMRYYADLKVQNNCFVELRHDRVTHFYSAPYAYIGRKARVIFTRSWVKIYVDNQLVATHSRKHEYGYTHVPEHLASKSRAVTERSAAYYITWAGRQSEECKAYVTEIFNPRRTSNPEEVYYRICGAIISSYRKYEASLVDLTCRQCLENRVFAYKRFEAILKNNYLHQADDEPCLFAPVPTDHANMRGNGYFK

SEQ ID NO: 401 - protein, 528 aa, synthetic construct
VWDRNRLVIAADSVADGFLVERNRPLPGRHVTDHQMRLFMTFRQSDAVPAAAAKASISAATAYRFEQDHRLPSHKAKTRGRRRPDPLADFFDAEVIPMLKAAPGLRSVAIFDEMQRRHPDLPAGARRTLERRIRSWRALHGADQEVIFRQVHEPGRMGLSDFTDMADLGVTIAGEQLDHRLYHFRLAYSGFEHAHVILGGESYVALAEGLQNALWALGGAPSEHRSDSLSAAFRNLDKNAREDLTRRYDALCLHYGMEPTRNNRGVAHENGSIESSHGHFKKAVNDALLMRGVNDFDDLGSYRRFIDEIVSRKNAHQAKRIETERPALQRLPGQRTCDYEETIVTVTSSGGFSLKKVFYTVPSRLIGHRLRVRLYDDRLDLFIGGTLLMTLTRGRADATGKRAHVVDYHHVIHALRRKPMALLNLVYRDQLFPREAYRQTFDRLLEKIPEKSACRLMVNLLALAHDRGCEAELATLLAADLAAGQLPDIVALRERFAPDPAALPEIVVQLTPLIAYEALLGNDMGEAA

SEQ ID NO: 402 - protein, 480 aa, synthetic construct
MLEVATLLTASFIESENRMKHPQHSTSVQVGLTLREISRWHEDLRELHGRLRPHFARPEVHQQALRYLQAVLSDVPRKNGWQLAEQARQAHPYGMQRLLSQAVWDQEAVRDEVRRLVSETLRSPRPQEADEAPFPVLVLDESGFPKRGRHSAGVGPQYCGRTGRVENCQVGVFLSYVTAAGHALIDRELYLPQDWCSDLPRRQAAHIPETVSFQTKPELARRMIQRAQSARLPIRWVVADTVYGHCPDLREWLEEQGYAYALAVPSTEVVCVQTRAGLLLSDVTSIARQALRARDWQRLSQSLGTKGERLFDWARLPVVHAGTGDGRHWLVVRRCLDDPHELAYFLVWAPPDTPLSTMVQAIGGRWHIEEDLQAGKDLGLDQYEVRSYLGWYRHITLVLLASAFLVGITVQSHLPASAPQQSAACPALLPLTTSEARHLLAHLFWPAPTSAPLICHWSWWRRTHQYWAGYYHRRRRAKAS

SEQ ID NO: 403 - protein, 512 aa, synthetic construct
MDVYELLRLLRGGESDRTITQLLRHNRRTIAKYRTWAETEGLLTGELPDRAALHRRLAARFPRVLPPQQTSTLSVYADEILVMRERGMEFAAIRSRLEERHGQPISYSAVRRLVHRLAPPPAAETFVRVEVPPGSEGQVDFGSAGLLIDPVTGAQRKAWVFVLVLSYSRHLYAELVFDQRVETWLACHEHAFRAFGGVPARIVPDNLKAAVVRASFTEPLAQRSYRECAEHYGFRIDPTPPRSPHLKGKVEQGGVHFVKRNFLAGRDPEPIDELNRKLRTWLVETAGPRLHGTTKQRPLERFTAIEQATLLPLPPTPYDPASWKAALLHRDGYVVFEGAYYSAPARLVGQRLWIRGGRRTVELYTSDDQLVWTHTRLAAGERETVDAHLPVHKLAGLRLSRERVQHQADAVGPATSSVVTALLAHRPEDRLRSAGRLLTLSARYGADRLEQACQRAVAFDQREYPTVKRILQEGLDTARADPHPALLSVERPAYAFARQAWEFAGALLGVGR

SEQ ID NO: 404 - protein, 492 aa, synthetic construct
MIDYETYMKIKTCHEKDGLNCNQISSITGLSFKTVSSWLAEERYRMRRSKDKSSKLDPFKNQILQMLEKYPYSAAQVFLRIKDNGFDGGYTIVKDYVRKMRPSKTKAYLKLSFAPGECGQADWGSFGSVKVGSTSRRLSFFVMVLCYSRMMYLEFTVSQTMEHFLNCHKNAFEFFGHVPKKIMIDNLKSAVLSRIIGQAPVFNPRYFDFAKHYGFDIMPCNVRAGNEKGRVENAVGYIKKNFLNGLDIPDFSSLHPAARLWLDSVANVRIHGETRQKPVDLFEKERPYLNPLPLNPFDVATVYQARASSQFRITYDANHYSVPAELAGERLTLKAYPDRLCIYKDDKLIARHPRCYDRYQDFEDPDHPKALLAQRRKAKDQKIYMRFLSLSPKAEQYCMMLMQRRLNPNHHIRKIVALSEIYHPDAVARAIEDALHFQAFSSEYVANILESRARLLPEPGALHLTRNEDLLDIDIQKPDLSVYERSDHEDKD

SEQ ID NO: 405 - protein, 493 aa, synthetic construct
MIDYQTFLKIKHLQQHAGLKCSQIAGKLGLDDRTVAKWLGEKQYRPRQSSQKRSKLDPFKDDIVRMLETHPYSAMQILQRIRDDGFNGGYSIVKEYVRKVRPKRVKAFLKLSFAPGECAQVDWGSYGTVTVGETHRRLSFFVMVLCYSRIMYLEFTVSQTMEHFLGCHQNAFYRFGCVPGKIMVDNLKSAVLKRAVGQDPILNPKYLDFANHYGFSIAPCSVGKGNEKGRVENGVGYVKKNFLSGLQIPDFNALNPAAVQWLDTVANVRIHGETGKKPIEMFEHERQSLNPLPAHPYDIASIDQVRASRQFRVPLDTNHYSVPAELAGQPLTLKTYPDRLCIYHQDKLIARHVRSFDRRKDFELPDHPKALMAQRKKARDQKIFMNFLTLHPNADDYYRQLEQRRMNPLHHIRQIVALSEIYGKDPVTRAIEDAFFFQAFSCEYIANLLEQRTRKLPEPGALHLTRRQDLLNLDVEKPDIAIYNRFSPEGELK

SEQ ID NO: 406 - protein, 497 aa, synthetic construct
MSSRKQGQTQEQASAKAGVSERSGRRIEDGQIGVLQARERHWRTRKDPFEAVWESEVVTLLEKQPGLDATTLFEDLQDRHQGRFGNGKKRTFQRRVKAWKALHGADKTVMFRQVQEPGRQGLSDFTLLKDVTVTICGEPLVHRLYHFRLAYSGWSHVTVVLGGESFSALAEGLQEALWRLGGAPREHRTDSLSAAYKNLSIDAQRDLTERYEGLCAHYGMVATRNNRGVSHENGAVESPHGHLKRRIAQGLLLRESADFACLEDYRQWLDALVGRFNRRCSEALAIEREQLQALPVRRTTDYSEQVVPVTTSATIEVKRVLYSVPARLVGERLRLHIFDDRIEAFVGAARAITLPRVYAVNHERARCIDYRHLISALARKPQAFRYSQLREDLLPNATYRAIWQHVDRHLEARAACKYIVGILALAARAECEQALGAYLSAQIGAGSIPALQALEQRFESRRPVGDCVDPNALHDGQHPLWVYDSLLPSHRQSLELH

SEQ ID NO: 407 - protein, 542 aa, synthetic construct
MHYLRDLVYRLRQGESERAIARDLGLSRMTVRKYHARAEAAGYLKAEATLPSAETVLAVLGTASAAPRTPSGVEPYATVVAELLAQRVEVMTIFDRLHDDHGYRGSYSSVRRYVQRVHPQPARVTVRVHTGPGEEAQIDFGAAGPFVDPASGRARSAWVFVMTLGYSRHQYAELVFDQTVRTWIACHRHAFAWFGGMARRLVLDNLKAAVLTAALHDPVLGEAYRRMAQHYGVVVSPTRPRTPEHKGKVENGVHFVKRSFLAGHTYADLRVANEALRHWIVERAGTREHGTTHEAPLALFEAQERAALLPLPAEPFELRETRRVKVHPDCHVVLDGSYYSVPYVQVGATLDAFVSERVVELFRGTELIATHPRAVRKGSWQTRLEHYPAQKAAFLERTPDFCRSLAERIGPATSEVVGQLLADRPLDRLRSVQGILGLVETVGRTRLEAACQRALAFGDPRYRRIKEILNAGLDQAPLPEGAEVVPGAAPAGDPSASPATAPARMAATAPPYTFERTAAELFPEDVLAAASLAATASTEVRR

SEQ ID NO: 408 - protein, 491 aa, synthetic construct
MIDYELYCKIRHLKEQEGLNAHQIAGDLAMDPRTVTKWLTRERFCPRKARLRSSKLDPFKNEILRMLQTHAFTAAQILQRIRGQGFAGGYSIVKDFVRGIRPPKGPAYLTLAFAPGECAQVDWGSYGSVTVGNTRRRLSFFVMVLCYSRMLYCEFTVSQSMEHFLCCHKNAFDFFGCVPKKIMVDNLKSAVLRRIVGRPPVFNPKYLDFANHCGFTIAACNVGRGNEKGRVENAVGYVKKNFLAGLEIPDFAAIAPAARNWLETVANVRIHGETRKKPVELFEAERLCLLPLPINDFDIASVSPQRASSQFRITLDTNRYSVPAEYAGRSLTVKTDPERICVYAAEKLVARHIRSYERYQDFEDPDHPKALLSQRKKARDQKIFMRFLSLSPKADLYYRKLQERRLNPQEHVRKIVALSEIYGHEPVARAIQDAFVFEAFSCEYIANLLQQRARFHKEPAALHLTRREDLLDIRLEHPDLSVYERMSDDEG

SEQ ID NO: 409 - protein, 515 aa, synthetic construct
MERLHMNYLRDLIYRIRAGESERRIAQDLKVSRPTVHKYKLWAEGQGYLNPEQPLPELAVLVAALGSASQPPHMTSSLEPYRETVERLLEQGVELTAIWQRLQQNYQYRGSYSAVRRFVQHLRPVEPEAIVRVQREPGEEMQVDFGSAGQLFDPVSGRLRPAYVFVATLSYSRHQYAELVFDQKIPTWLGLHRRALESFGGVPKRVVPDNLKAAVLAALVHDPVLGEAYRRLALHYNFLISPTRPATPQHKGKVENGIHYVQRNFLAGQEFVDIDTGNARLKIWVRDVAGSRTHGTTHQAPLRLFHDYEQAALQPLPATPFTLHQIKPVKVHPDCHVTLDGSYYSVPYRYIGQQLDAYVSDHLVELYDGVDLVVTHVRSSRPGQWQTRLEDYPPEKAAYLLQTPQYCRQWATQIGASTSQVVEMLLTDKPLERLRAVQAILGLEKSVGRQRLEAACQRALHFGDVRYRRIKQILNAALDQDPLPEVVTPPPSGKNFTFARPSRDFFPTEPEGRPC

SEQ ID NO: 410 - protein, 480 aa, synthetic construct
MLEVATLLTASFIESENRMKHPQHSTSVQVGLTLREISRWHEDLRELHGRLRPHFARPEVHQQALRYLQAVLSDVPRKNGWQLAEQARQAHPYGMQRLLSQAVWDQEAVRDEVRRLVSETLRSPRPQEADEAPFPVLVLDESGFPKRGRHSAGVGPQYCGRTGRVENCQVGVFLSYVTAAGHALIDRELYLPQDWCSDLPRRQAAHIPETVSFQTKPELARRMIQRAQSARLPIRWVVADTVYGHCPDLREWLEEQGYAYALAVPSTEVVCVQTRAGLLLSDVTSIARQALRARDWQRLSQSLGTKGERLFDWARLPVVHAGTGDGRHWLVVRRCLDDPHELAYFLVWAPPDTPLPTMVQAIGGRWHIEEDLQAGKDLGLDQYEVRSYLGWYRHITLVLLASAFLVGITVQSHLPASAPQQSAACPALLPLTTSEARHLLAHLFWPAPTSAPLICHWSWWRRTHQYWAGYYHRRRRAKAS

SEQ ID NO: 411 - protein, 515 aa, synthetic construct
MRRKEIVEIMAMLQHLRAGASNNQIKRELKVSRHTARAYRQWASEQGLLAGPLPAIEELERLRAETVGPVLPPQNISRVEPYREFVLKLFDQGVEIAAIYQRLVGQGFSGSYAAVYRFVRRERAKQPEVMVRVECQPGEEAQVDFGYAGYMFDPEKGKLRKSWAFVMTLSWSRHQYVEFVFDQKLATWLRLHRNALAFFGGVPGRLVIDNLKAGMAKACWEEPQPQLAYRECAEHYGFLIAPCKPKTPQHKGKVEQGGVHYVKRNFLGGREATSLVQANRDVRTWCLTTAGQRTHGTTKKQPLVQFEEVEQAVLQPLPTTPYDLAIWKKAKLHQDCYVVFENAYYSAPFRLVGQYLFVRGGSCQVRLYTSDYQLVATHEPAKEAGQRQTHPDHLPPEKVAGVFLTRATCLATAQDIGPATAEVVQTLLADTILERLPMVRRLLAWRDRVGDERLEAACGRALRFGDPSYKTVKGILQQGLESAPDPGPAAAPPAKTFVRTAVELFGQKLGGLSWN

SEQ ID NO: 412 - protein, 489 aa, synthetic construct
MIDYELYCKLRHLKDHEGLSAHQIAGELAMDPRTVAKWLARKRFCQRKAVPRVSKLDPFKAEIARLLQSHAFSAVQILMRIREQGYAGGYSIVKDYVRSIRPSKRPAYLTLAFAPGECAQVDWGSYGSVAVGNTRRRLSFFVMVLCYSRMLYVEFTVSQSLEHFLYCHKNAFDFFGHVPKKIMVDNLKSAVLQRVLGRPPLFNPRYLDFANHYGFAITPCNVGRGNEKGRVENAVGYVKKNFLAGLEIPDFTVIGPAVRNWLQTVANVRLHGETRKKPVEIFEAERPCLLPLPINAFDIATVSQQRASSQFRITCDTNRYSVPAEYAGRALTVKTDPERICVYAGEKLIARHIRSYERYQDFEDPDHPKALLAQRKKARDQKIFMRFIALSPKADLYYRKLAERRLNPQQHVRKIVALSEIYGTDPVARAIEDAFIFEAFSSEYVANLLQQRARFHKQPAALHLTRREDLLDIRLEHPDLSVYERISDE

SEQ ID NO: 413 - protein, 514 aa, synthetic construct
MERIHMNLYKEIIYRLRAGESERSISRDLEISRPTVHKYKQKAEAEGYLEKERGLPRSDEIAESLGPAPHPPRVSSTVESYREAVKKYLDQELEMTVILQRLREDHGYQGSYSSVRRFVHHIQPKENEAYVRVHSEPGEEMQVDFGSIGQVYDPGKGKMRKAYVFVTTLCYSRHQYAEIVFDQKVGTWIGLHQRALAFFGGVPRRVVLDNLKAAVVKALVLDPILGEAYRKLGQHYHFLISPNRPHTPRHKGKVENGVNYVKRNFFAGREFVDVDAANLRLKAWVMETAGVRDHGTTHEAPLKAFGEVEQVALGALPEEPFDLCDVRLAKVHSDCHIVVEGSYYSAPYRWVGSEVEVHLYERVVEIFAGQELIRTHLRAGRKGQWRTEMDDYPPYKVQYLLKTPEYCLQAARRVGPCTHQVVEQLLADRPLDRLRSVQAILSLADSVGESRLEAACARALHFGDPHYRRIKDILNAALDREPLPDLAVPLPRQQAFTFTRASGEFFSAGSENAR

SEQ ID NO: 414 - protein, 497 aa, synthetic construct
MIDYLTYCQIRSLHQDEKLTAGQIARKLQLDKKTVRHWLRHPYHEHKRPNRSSKIEPYKPRIQAWLQQHDYTAQQILQKLRADGAQVGYTIVGDYVRSIRPKPVRAFLTLSFCPGECLQVDWGSWGLIPIGSTRRRLSFFVAVLCYSRLMYVEFTLGQSQEHFLRCHQNAFGFFEGVAGSVMVDNCKTAVLRHPLGQPAQINPRYLDFANHYGFTVRACGVRKGNEKGRVENGVKFVKENFLRGLDLPPWPALNPAARHWLETIANVRVHRGTRKPPGELFAEERSKLTPVTALPYDTALVRPLPVNSRFRVVWETNRYSVPAHWAGSTLTAKIEAERIALYHQDQPVAEHVRSYDRHQDFEHPDHARPLLAQRQKAREQQLLTRFLSLCPQAPAYFEQLQHRRLNARHHVQKILALVEIHGPDLVTRAIHDAHHYQAYSCEYIANILEQRQRKLPEPGALHLTRAADLLELELPEPDLSVYDPKPNPSDPQSAYES

SEQ ID NO: 415 - protein, 494 aa, synthetic construct
MKLRQTNSVAVAAAKAGFSTATGYRIETTPSLPSQKVKPRGRRRPDPLEHIFETEVVPLLKAAPGIRAVAIFQEMLRRHPELGSGIRRTLERRIRSWRAVHGEEQEVIFRQVHEPGRLGLSDFTDMGSLGVTIAGQPLDHLLYHFRLVYSGFEHAHVILGGESFVALAEGLQNALWSLGGAPHDHRSDSLSAAFRNLDTDAKQDLTRRYEELCAHYGMTPSRNNRGIAHENGSIESAHGHLKSALRDALLMRGSSDFDDLEAYRAFIDEIVSRRNALGDKRIDAERAHLKQLPQRRTTDYEEVVVRVGRTGGFTLRKVFYTVPSRLIGHRLRVRLFDDRLDVFVGGTHLMTLPRGRASPEGKHDQVVNYRHVIHSLRKKPMALLQLVYRDKLFPRQEYRRTFDTLMEKLSDRQACKIMVELLALAHERGCERELAERLADTLDDGELPDMAALRMLFSPDPDMLPSVSVRLASLSGYEALVDGACELNMAGEVA

SEQ ID NO: 416 - protein, 489 aa, synthetic construct
MIDYELYCKLRHLKDHEGLSANQIAGELAMDPRTVAKWLARERFCQRKAVPRSSKLDPFKPEITRLLESHAFSAVQILMRIREQGYAGGYSIVKDYVRSIRPVKNRAYLTLAFAPGECAQVDWGSFGSVAVGNARRRLSFFAMVLCYSRMLYLEFTVSQSLEHFLACHQNAFHFFGSVPQRIMVDNLKSAVLRRVLGRPPVFNPRYLDFANHFGFTISPCNVGRGNEKGRVENAVGYVKKNFLAGLEIPDLAAIGPAVSNWLQTVANVRLHGETRKKPVELFEAERPCLRPLPVNTFDIATVSQQRASSQFRITCDTNRYSVPAEYAGRALTVKTDPERICVYAQDKLIARHIRSYERYQDFEDPDHPKALLAQRKKARDQKIFMRFIALSPKADLYYRKLAERRLNPQQHVRKIVALSEIYGKEPVARAIEEAFIFEAFSSEYITNLLQQRARFPKEPAALHLTRREDLLDIRLEHPDLSIYERKTDE

SEQ ID NO: 417 - protein, 489 aa, synthetic construct
MIDYELFCKIRHLKDHEGLSAHQIAEELAVDPRTVVKWLARERFCPRKASLRVSKLDPFKAEIARLLQSHAFTAAQILVRIREQGYAGGYSIVKDYMRAIRPSKRPAYLTLAFAPGECAQVDWGSYGSVAVGNTRRRLSFFVMVLCYSRMLYVEFTVSQSLEHFLYCHKNAFNFFGRVPQKIMVDNLKSAVLRRVLGRPPVFNPRYLDFANHYGFAITPCNVGRGNEKGRVENAVGYVKKNFLAGLQIPDFAAIGPAVRHWLEMVANVRIHGETRKKPVELFEAERPCLRPLPANGFDIATVSPQRASSQFRITIDTNRYSVPAEYAGRALTVKTDPERICVYAGEKLIARHIRSYERYQDFEDPDHPKALLAQRKKARDQKTFMRFIALSPRADLYYRKLAERRLNPQQHVRKIVALSEIYGKEPVTRAIEDAFIFEAFSSEYIANLLQQRARFHKQPAALHLTRREDLLDIRLEHPDLSVYERISDE

SEQ ID NO: 418 - protein, 491 aa, synthetic construct
MIDYETYMKIKSYSEKDGLNCSQIAAITGLTFKTINKWLNEKRYRMRKSSGRASKLDPFKNQIAGMLEKYPYTSAQIFLRIKENGFDGGYTIVKDYLSKVRPPKIKAYLKLFFAPGECAQVDWGSYGSVNVGSSRRRLSFFVMVLCYSRLMYVEFTVSQTMEHFLACHQNAFNFFGAVPKKIIVDNLKSAVLKRIVGQAPVFNPRYVDFADHYGFDIAACNVGAGNEKGRVENGVGYIKKNFLAGLDIPDFAAVHPAVRHWLDAVANVRIHGETHKKPLELFEKERPFLNALPANLFDVGAVSQVRASSQFRVPVDANRYSVPAEYAGALLTLKTYPDRLCIYSDNKLVARHVRSYDRHQDFEDPDHPRELLIRRKKARDQKIHMRFLTLSPKAEQYHQMLEQRRMNPHHHVQKIVALSEIYGPEAVSRAIDDAFTFKAFSCEYIANLLEQRTRFLPEPGALHLTRSEDLLDIDIEQPDLSIYERKDHDDK

SEQ ID NO: 419 - protein, 523 aa, synthetic construct
MLTTEQINDLHRLYWSEHWPIRKIERQLNIGWRTIRKYLDAPAQAPVHRDRPSKLDPFKGAVAEWLEKDPGVSAAVIEQKLRAAGYRGGHSILREYVRNARPHIAPKRAFVRMEPLAGERFEVDWGHFGALSYSGDIRKLYAFALVDAHSRMLYVEFTHSQSFGTFARCHVHAFTALGGIAREIAYDNLATAVVEHEGRLVRFLPRFLAFARDYGFYPHACNPASGWEKGKIERAIGYLRQNFWPLREFTDLHDVNRQVRQWLAEVANQRVHRETRQRPLERFQPEALKPLPVIPYDYRDVTEALVHKDLRLAFDGNRYCVHQRYVDRRLIIKADSSSVTIYDRVEEVVSYPRSWRRGQTFGADRFEKILAEERPAARRSQAQRRLLDSLDGLCSPALVEAYLRDMAGSDRSLGRQISELLELIRQYGPEDVAGAIEKAAAARAFGADYIANILRQQRSPRRPQPPLRLRDPLLNELATDPISLLDYDAFILESGKECDDSPRTEAAATQPESHEPSGRGHDR

SEQ ID NO: 420 - protein, 528 aa, synthetic construct
MAGTIKDMSLIKQVIQLKQLGESNRGVSRKLSINKGTVNAYVNIIQCNGFNYDELLSKNDPELDRLFHAGSPAYSDPRMADFLAKLPYFKEQLGNPKLHVTRQLLYEEYKAGYPHGYGKSQFYFHLQQNLIAQKDCTAVLTETYNPGEKLMVDFAGDKLSYVDIETGEIIKVEVFVACMPYSDYTYVICVPSQKTEDFLFAIRMCLEYLGGVPPILTPDNLKSAVITNDRHEPKLNKALEDMGNHYHFVVLPCDPKEPTQKALVEDKVQTTYNRIYAKLRGRTFYSIVELNRAVWDLLSLFNKTRMQKRPYSREERFHAAEKDKLKQLPQKIYEMKYYANLQVQTNCFVELRQDKVTHFYSVPYIYVGKKALVIFTRSVVNIYIDGTQVATHMRSYEYGHTYIKEHLASNCRAIMERSASYYITWASHISPECRNYISEVFNPQRTSQPEEVYYKLCASIMSLSRKYEVAIIDKTCRQCRECKVFSYRKFEAILKHNSLIASEDEPTRCFEAPIPKDHANMRGSNYFK

SEQ ID NO: 421 - protein, 493 aa, synthetic construct
MIDYELFCKIKHLHEHEHLTVAQMAAELALDPRTVRNWLAQERFCQRKDSPRSSKLDPFKADIARMLEAYPLSATQILQRIREQGFAGGYSIVKDYVRGIRPQRSRAYLTLAFAPGECAQVDWGCFGSVPVGNTSRRLSFFVMVLCYSRMLYLEFTVSQSLEHFLACHQNAFHYLGYVPQRIMLDNLKSAVLRRIIGQAPVFNPKYLDFANHYGFSISPCNVGKGNEKGRVENAVGYVKKNFLAGLEIPDFAAIAPAAKHWLESVANVRLHGETRKKPVELFEQEKSSLLKLPVNDFDIATVSQQRASSQFRITLDTNRYSVPAEYAGRRLTVKTYPDRLCIYAEDKLIARHIRSYDRHQDFEEPDHPKALLAQRKKARDQKIFMRFLALSPTADLYYRKLEDRRMNPREHVRKIVALSEIYGTEPVARAIEDAFFFEAFSCEYIANLLEQRSRFQQEPKALHLTRRQDLLDITLEHPDLSVYEERSPEHEPT

SEQ ID NO: 422 - protein, 494 aa, synthetic construct
MVMDPKTIEAIYRMTHEQKQSQREICRQLHVARKTIRKYLQNPAPKPAIRKPRPSKLDPFKPVIRELLDQCPRASSVVLAQRIRPLGYDGGRSILEEYVARLRRIQQPPRAFVRIESSPGDCFQIDWGHFGALDYQGDRRKLYAFCCIECHSRRLYVEFTHSQCFETFVRCHIHAFQFMGGSARECLYDNLATAVAEHDGRLVRFNPRFLAFARELGFYPRACNKAAGWEKGKVEKGGVGYLRHNFWPLRTFTDLADVNAQARQWLDQIANRRIHRETREVPDERFRPGCLRPLPPLMPDYRDADIALVHKDFRLSFDGNRYCVPPRWVGYRLTVKADSQSVAVYYHGEELARYVRSWRRGQTFGAERFEKELLLQRTLADRSAAHRRLIMFLGEAGESYLRGLAETDRSLTRQINELLFLVRQYGPDPVIAAVTKAHSVGAFGADYIANILMQEKSAREIQPLLLLKDPRLNGLATDPLSLLEYDALILNSKE

SEQ ID NO: 423 - protein, 513 aa, synthetic construct
MEQLHMNHWRDLIYRLRAGDSERQIARDVGLSRTTVHKYHALAQAQGFLEPDRAAPDDETLQAALGNGSPPPHALSSVEPYQELVQRLLDQQVEMTAIYQRLRDDHGYRGSYSAVRRFVHHLQPAAPEAVVRVHTDPGEEMQVDFGAVGRLFDPGAGYPRSAYVFVATLSFSRHQYAELVFDQKTPTWIALHQRTFESFGGVVARVVPDNLKPAVKQILVHDPVLGEAYRRLALHYGFLVSPTLPATPQHKGKVENGVHYVQRNFMAGQDFVDIHVANQRLKVWVREVAGTRIHGTTHQPPLQLFNDYERATLRPLPPTPFTLCEVKPVTVHPDCHVQIAGSYYSVPYRYVGQTLEAYISERVVELYHAQELVATHVRSAKPGQWHTRLEDYPPDKAAYLQRTPDRCRQLAAQVGPATRQVVEQLLDERPLDRLRAVQAILRLQESVGPRRLEAACARALYFGDISYRRIKAILNAALDREPLPEAAPPPIQQAFVFARPVTEFFVASEEVSR

SEQ ID NO: 424 - protein, 493 aa, synthetic construct
MLNPEQIDALHRLHWAEKWPVRKIARHLKLGRRSVAKYLASPAPVPVPRERPSKLDPYKPLLSELLEQDPAAPAVVIAQRLRPQGFAGGITILKNYLHGLRASSIVKRALVRVEPAAGERFDIDWGHFGALDYQGDARKLYAFALVECHSRKLYVEFTHGQSFETFARCHIHAFHTLGGVARDLVYDNLATAVAEHDGNLVRFNPRFLALAREFSFYPRACHVAAAWEKGRIERAIGYVRQNFWPLRSFTDLADINRQVRQWLAEVANQRVHRETRERPEERFRPECLRPVPAIIPDYRDTVEALVHKDLRLWFDGNRYGVPPRYVGHRLTIKADSSSLTIYERVNEIVSYPRSWRRGQTFGADRFEPELAENRPAAKRSLAQQRLIALLGHAGETYLRGLADTDRSLMRQMIELLELIRQYGPEAVASAIEKAQAAGAFGADYVANILRQQQARRDPQPPLRLRNPQLNDLVTDPLSLLDYDSFILDPEKKS

SEQ ID NO: 425 - protein, 493 aa, synthetic construct
MIDYELFCKIKHLHEHEHLTVAQMAAELALDPRTVRNWLAQERFCQRKDSPRSSKLDPFKADIARMLEAYPLSATQILQRIREQGFAGGYSIVKDYVRGIRPQRSRAYLTLAFAPGECAQVDWGCFGSVPVGNTSRRLSFFVMVLCYSRMLYLEFTVSQSLEHFLACHQNAFHYLGYVPQRIMLDNLKSAVLRRIIGQAPVFNPKYLDFANHYGFSISPCNVGKGNEKGRVENAVGYVKKNFLAGLEIPDFAAIAPAAKHWLESVANVRLHGETRKKPVELFEQEKSSLLKLPVNDFDIATVSQQRASSQFRITLDTNRYSVPAEYAGRRLTVKTYPDRLCIYAEDKLIARHIRSYDRHQDFEDPDHPKALLAQRKKARDQKIFMRFLALSPTADLYYRKLEDRRMNPREHVRKIVALSEIYGTEPVARAIEDAFFFEAFSCEYIANLLEQRSRFQQEPKALHLTRRQDLLDITLEHPDLSVYEERSPEHEPT

SEQ ID NO: 426 - protein, 498 aa, synthetic construct
MIDYEHWCRIKQLAERDHLNAAQIARAEGLAPRTVRRWLGEPYRPRRRVERASALDPFKGRIMGLLKEHPYSAVQVLAMLREEGFPGGITIVKDYIQQVRPRGQEAFLTLAFAPGECAQVDWGSWDAVPVGSTRRRLSFFVMVLGYSRMLHVEFTLGQGEEHFLACHRHAFERFGGVPARIMCDNCKTAVLSHPHGLNPLLNPRYADFAAHYGFSVQACRVRRANEKGIVENAVGYVKHNFLAGRPINQFDSLNPAVGLWLDEVANVRVHGRTRRRPVDLFVAEKPLLKPLPRHPYDCASVGSVVVDRQFRVRVDGNRYSVPAAYAGRRLLLKRGPDRLCCYDGEKLVALHPRSYDRNRDVEDPEHARELLARRRRAEEPHLLKRFLAISPLAETYYRQLAERKISWRLHLRKIVALAELHGTDAVARALADALAYHAFASDYIANILEHRARLLPDPGPLHLARKQDLLDLELPAPDLSVYDTEQPASGDSNDEART

SEQ ID NO: 427 - protein, 430 aa, synthetic construct
MIDYETYMKIKNYNENEGLNCNQISAITGLSFKTVSKWLDEDRYRMRKPADRSSKLDPYKNQILQMLEKYPYTAAQIFLRIKDNGFDGGYTIVKDYVRKMRPKKYKAYLKLSFAPGECGQVDWGSFGSVNVGSTTRRLSFFIMVLCYSRMMYLEFTVSQTMEHFLNCHKNAFEFFGSVPEKIMVDNLKSAVLSRAIGQAPVFNPRYLDFAHHYGFGITPCNIRAGNEKGRVENAVGYVKKNFLHGLDIPDFSAIHPAAKLWLDNVANVRIHGETHKRPVDIFEEERPSLNPLPLNPFDVATVLQVRASSQFRINFDSNRYSVPAEYAGEKLTLKACPDRILLYKDQKLIANHPRCYDRYQDFEDPDHPRVLLAQRKKARDQKIYMRFLTLSPKAEQYYLMLEQKRMNPKHHLQKIVALSEIYPLMKWQEP

SEQ ID NO: 428 - protein, 492 aa, synthetic construct
MIDYETYMKIKNYNENEGLNCNQISAITGLSFKTVSKWLDEDRYRMRKPADRSSKLDPYKNQILQMLEKYPYTAAQIFLRIKDNGFDGGYTIVKDYVRKMRPKKYKAYLKLSFAPGECGQVDWGSFGSVNVGSTTRRLSFFIMVLCYSRMMYLEFTVSQTMEHFLNCHKNAFEFFGSVPEKIMVDNLKSAVLSRAIGQAPVFNPRYLDFAHHYGFGITPCNIRAGNEKGRVENAVGYVKKNFLHGLDIPDFSAIHPAAKLWLDNVANVRIHGETHKRPVDIFEEERPSLNPLPLNPFDVATVLQVRASSQFRINFDSNRYSVPAEYAGEKLTLKACPDRILLYKDQKLIANHPRCYDRYQDFEDPDHPRVLLAQRKKARDQKIYMRFLTLSPKAEQYYLMLEQKRMNPKHHLQKIVALSEIYPPDEVARAIEDAFEFQAFSCEYIANILEMRARSLPEPGALHITRNQDLLDIDIQKPDLSVYERKNHEEKS

SEQ ID NO: 429 - protein, 450 aa, synthetic construct
MADFLAKLPYFKEQLGNPKLHVTRQLLYEEYKAGYPHGYGKSQFYFHLQQNLIAQKDCTAVLTETYNPGEKLMVDFAGDKLSYVDIETGEIIKVEVFVACMPYSDYTYVICVPSQKTEDFLFAIRMCLEYLGGVPPILTPDNLKSAVITNDRHEPKLNKALEDMGNHYHFVVLPCDPKEPTQKALVEDKVQTTYNRIYAKLRGRTFYSIVELNRAVWDLLSLFNKTRMQKRPYSREERFHAAEKDKLKQLPQKIYEMKYYANLQVQTNCFVELRQDKVTHFYSVPYIYVGKKALVIFTRSVVNIYIDGTQVATHMRSYEYGHTYIKEHLASNCRAIMERSASYYITWASHISPECRNYISEVFNPQRTSQPEEVYYKLCASIMSLSRKYEVAIIDKTCRQCRECKVFSYRKFEAILKHNSLIASEDEPTRCFEAPIPKDHANMRGSNYFK

SEQ ID NO: 430 - protein, 523 aa, synthetic construct
MAGKITSMSKIKQVLIMHKQGMSNRDIASEIGINKCTVNDYMRKIRLEPLGIDELLALDDPVLEGRLFAGSPAYTDPRMEEFLKELPYFIDQLKIPHVTRFLLWEEYIRKHPDGYGKSQFFFHLKQNLVVKKTPVGVLTNRYEPGKELFVDFAGDTQSYIEPSTGEVIEVQVFVATLPYTDYAFAFCIESQKVEDFLHCIRMCLEYIGGVPRILVSDNLKSAVIKSDTYEPTLNKALEDMGNHYHFAVLPARSLHPKDKALVESQVSRIYHKVYARLRNRQFYSLQELNEAISQALLAYNQTRMQLRPYSREEHFHSSEKSALQPLPDIIYEMKCYANVTVRETGEVYLSCDKHFYSVPYELTGRKASIIYTRSLVKVYVDNKSVAIIPRDRTPGEHTQIPAHLPPNVRAYLERSPESYCDKARHVSESLEKLFQSMFFNRATGVNFDVYYRSCEKMLSLQKKTASSLFDKACDVCRINHIYRGTGLEDVINAMGKTIADEESERSTVIPSNHENTRGPAEYK

SEQ ID NO: 431 - protein, 498 aa, synthetic construct
MIDYEHWCRIKQLAERDHLNAAQIARAEGLAPRTVRRWLGEPYRPRRRVERASALDPFKGRIMGLLKEHPYSAVQVLAMLREEGFPGGITIVKDYIQQVRPRGQEAFLTLAFAPGECAQVDWGSWDAVPVGSTRRRLSFFVMVLGYSRMLHVEFTLGQGEEHFLACHRHAFERFGGVPARIMCDNCKTAVLSHPHGLKPLLNPRYADFAAHYGFSVQACRVRRANEKGIVENAVGYVKHNFLAGRPINQFDSLNPAVGLWLDEVANVRVHGRTRRRPVDLFVAEKPLLKPLPRHPYDCASVGSVVVDRQFRVRVDGNRYSVPAAYAGRRLLLKRGPDRLCCYDGEKLVALHPRSYDRNRDVEDPEHARELLARRRRAEEPHLLKRFLAISPLAETYYRQLAERKISWRLHLRKIVALAELHGTDAVARALADALAYHAFASDYIANILEHRARLLPDPGPLHLARKQDLLDLELPAPDLSVYDTEQPASGDSNDEART

SEQ ID NO: 432 - protein, 482 aa, synthetic construct
MRISRQTVHKYHELAKKEGYLVAEVEIPDNEKLRDVLGPGPQPPKIASSVEQFGEIVKTLRKQGVEMVAIWQRLRDNYGYSGSYSAIRRYVHQLEPKEPEVYTRVQTAPGQEMQVDFGEVGQLYDPASGTMRSGYVFVATLSHSRHQYAELVFDQKVVTWIGLHRRAFEYFAGVPARVVPDNLKAAVQKILIHDAVLGEAYRKMALHYGFMISPTIPYTPRHKGKVENGVHYVQRNFMAGQEFADIHCANQHLKNWIRDVAGVREHGTTHQAPLSLFKEFEQAALLPLPETAFSLCEIRVAKVHSDCHVVILGSFYSAPYACVGQKLDVYLHEKTVELYQNQKLVATHLRCEHPGEWQTRLEHYPAQKAAFLERTPDFCRKLAIRLGPATSKVVNSLLADRPLDRLRSVQAILRLEESVGPQRLEAACARAVHYGDFRYRRIKEILNAALDCEPLSETAAVQPKIAHTFARSTTDFFAPVQS

SEQ ID NO: 433 - protein, 531 aa, synthetic construct
MLNTDRINEIHRLFHGEHWSARKIARHLHLSRKTLRKYIQSPMQTPAHRQRTSKIDPFKSTVADLLEQDPSASAVVIMQRLRPLGYDGGITVLRNYARQLRGPVHPPRAFVRMEPGPAERFEVDWGHFGTLDYAGDKRNLYAFCLVEAHSRMLYVEYTHSQSFETFVRCHLHAFEALQGVARECWYDNLLTVVAEHVGTLVRFNPRFLAFARECGFFPRACNPASGWEKGKVERGGVGYLRQNFWPLRQFTDLSDVNRQVREWLDEVANQRLHRETRQRPCERFRPDCLRPLPALLPDYRDTVEALVHKDLRLQFDGNRYCTPPHLVGQRLTVKADASSVALYHRNQEIVRYPRCWRRGQTFGAERFERELLAHKAAAQRSQAQRRLIALLVSDCSQDAVEAYLRGLADTNRSLSRQITELLQLTRQYGPQAVAAALQKAHAARAFGADYVANLLRQQLSPRNPQPPLQLRDPQLNQLVTDPLSLVDYDAFIVEARKEPHDSPGTETRTTETADDEPEAGTDAEGSGGEKP

SEQ ID NO: 434 - protein, 492 aa, synthetic construct
MIDYQTYCQIRHLLTEKKLGLRQIARDLKLGLNTVRKWARRETFKPAAIPQRPSKLDPFKGDIVRLLEQHAYSAQQIFQQLKERGFQGRYTIIKDFVRQVRPKPRPAFLTLHFAPGECAQVDWGCAGSVPVGSTQRRLSFFIMVLAFSRKMYLEFTLAETMEHFLSCHQRAFEYFNGVVRQVWVDNCKVAVLSRAAGLITFNPRYLDFANHHGFQIRACGPSQPQEKGRVENGVGYVKKNFLHGLQLSDFQTVNPAARYWLDTVANVRVHGQTQKTPQELFTEEKLNPLHPLSYEAAVVGPIRANSQFRIIVDGNRYSVPCHYASSQLTLKRFADRLLIYDREKLVAEHVRRYDRNQDYELPDHVAPLLLHRKRAREQKLFLRFLALCPKANDYYQQLEQRRLNPKHHVQKIVALSELYGIETVARAMEDAFTYQAFSCEYIANILQQRQHPPAEPGALHLTRQQDLLELDLPAPDLSIYDSKNHPDFLTPL

SEQ ID NO: 435 - protein, 491 aa, synthetic construct
VIDYETFAKIHDCHDRQGLTIAQTTRALGLDSRTVATWVARSRFEPRRSRPRGSVLDPFKPRITRLLDTHPYSAQQIFQRLREEGYRGGVTILRDYVRRIRPTKRPVYLKLHFAPGECAQVDWGAYGTVAVGNTRRRLSFFVMVLAFSRQMFVEFTVSQTMEHFLACHEHGFAALGGVPSKIMVDNLKSAVLQRLAGAAPVFNPRYLDFARHHGFAIEACNVARGNEKGRVESGVGYVKKNFLHGIELTDFSTIQAAAQVWLDTIANVRIHGETQQRPVDLFAQERPHLGSLNPHPYDIAITSTSVASSQFRITLDTNQYSVPAAYAHRRLTVKAYPDRVCIYFDNQLIARHTRRYGRHEDIEDPDHAKGLIAQRSRAREQRLMMHFLALSPDAQAYYDGLEQRRLNARHHVRKILALAEIYPADVVARAISDGLAFQAFSAEYITNILETRARALPEPGPLQLTRRHDLLDIDIAPPDLNAYEVNDHDPE

SEQ ID NO: 436 - protein, 532 aa, synthetic construct
MLNLEQINEIHRLAGGEHWSLRRIAHQLRLAARTVKKYLATPVPSPVRRPRPSKLDPFKPLMRELLEQDPHAPGAVILQRLQAAGYSGGHTILRDHLQRVRVSHLAPRAFLRMEPGPGERFEIDWGHFGALDYQGDKRKLYAFCLIEAHSRMLYVEFTHSQNFETFLRCHQHAFAALHGVSRECWYDNLLTAVAEHDGRLVRFQPRFLAFAREYDFYPQACNPGAGWEKGKVEKGGVAYLRSNFWPLRSFTDLTDVNRQVRQWLDEVANVRLHRETCQRPCDRFRPDTLRPLPALTPDYRDTATVFVYKDLRWHFDANRYCAPPRFIGQHLTAKGDASSVTLYDRQGVEIVRYARCWRHGRTLGGERFQKELLEHRPAALRSEAQQRLLKLLQGVCPAETVEAYLRGLADSDRSLLRQLQELLGLFRAYRPEQIAAALEKALAARAFGADYVANLLHQIASPREPQPPLQLRDPELNQLTTDPLSLLDYDAFILKDRKESADDPGRETDSTSPDHHGPETGDDDPGSGQPKS

SEQ ID NO: 437 - protein, 503 aa, synthetic construct
MIDYSTYCRIHALAGENGLNASQIAAELGLHLDTVTKWLNEPKYRPRTSTPRTSKLDPFKPRILRMLERYSYSAVQILTRLREEGYEGGYSILKDYVRKVRPPRRPAYLTLHFEPGECAQVDWGHAGTIGVGNTRRRLSFFVMVLAHSRMLYVEFTLAQSMEQFLACHQNAFDAFGGSVRRVMVDNLKSAVLSHPAGQPAVLNPRYLDFASHYGFEITACNVRAANEKGRVENGVRFVRSSFLRGLEIDSFALLNPAVRHWLDTVANVRIHGETHRRPIDLFEEERPHLLPLPLAPYDVGTPRPLTASSQFRVTLDTNRYSVPSEYAGARLTLRLYPDKVLIYHQGQLIAQHTRSYQRRLDILEPDHQRRLLQQRRKGREQLLLMQLMRISSRAEELIAGLQHRRLNPTSHIRKVVALAEIYGRDELARAIDDALEYHAFSSEYIANILEQRARHLPEPGALHLTRREDLLDLELPEPDLSIYQSDENLPQEEDDHEDQDPHR

SEQ ID NO: 438 - protein, 503 aa, synthetic construct
LHHIQQGVSDRRIARELGVNRRTVQQYRKWAEEQGLLTGALPPPEQLQELLKQTLPEKQPPQNRSSVTVHEEQIIKLHNAGVEVAAIVARLQEQGYTGSYFPVYRLVRKLAAKQPEVFVRVECKPGEEAQVDFGYIGYLLDPETGERRKAWAFVMTLSWSRHMYVEFVFDQKVETWLRLHRNALAFFNGVPERIVIDNLKAGIVKATQDDPQVQYAYLECAEHYRFRVAPCRPATPEHKGKVESGVHYVKRNFMAGRAMTDLHTANHAVRQWCLTTAGERTHGTTKEQPLARFKATEQAALRALPATHYDLAIWKEVKLHRDCHVVFEHAYYSAPFRLVGQQLRVQGGSREVRIYTKGYELVATHERAQRPGQRITNPHHLPAEKLDGLFVDRPLCQATADAIGPAAAQVVEQLLTDPVVERLPTVRRLLKLRKHYDDARIEAACHRALRFGDPTYLTVKRILETGQEQAPLNQPPVIHAPAHTFQRTPADLFGEQVGGIRWN

SEQ ID NO: 439 - protein, 506 aa, synthetic construct
MPGRHVTDQQMRLFMTLRQTHSTPVAAAKAGISQATGYRLQADPTLPSQKKTPRSRRRPDPLADIFDAEVVPLLRSSPGIRPVAVYEELQRRHPDLGTGIRRTLERRIRAWNAEHGPEQEVIFRQVHTPGKMGLSDFTAMGKLGVTVAGEPLDHRLYHFRLAYSGFQHAHVVLGGESYVALAEGLQNALWTLGGVPHDHRTDSLSAAFKNLDQSAQTDLTDRFDALCRHYGMMPTRNNKGVAHENGSIESPNGHLKRAIEDALVMRGVRDFEDLAAYRRFIDEIVGRINARNGKRIDMERPSLRPLPARRTTDYEEVTLRVTSSGGLTLRKVFYTVPSRLIGHHLRIRLYDDRLELFLGGTSLLTLPRGRASSSGSHGHVVNYHHVIHSLRKKPMALMGLVYRDQLFPRRAFGDMFAVLLEQTGEKKACRMTVDLLALAHDRGCEAELAAQIEEDLRQNRPPDMAALRALFSPPVEALPKVEVRMADLSSYDQLVGDAASAEEVAA

SEQ ID NO: 440 - protein, 506 aa, synthetic construct
MPGRHVTDQQMRLFMTLRQTHSTPVAAAKAGISQATGYRLQADPTLPSQKKTPRSRRRPDPLADIFDAEVVPLLRSSPGIRPVAVYEELQRRHPDLGTGIRRTLERRIRAWNAEHGPEQEVIFRQVHTPGKMGLSDFTAMGKLGVTVAGEPLDHRLCHFRLAYSGFQHAHVVLGGESYVALAEGLQNALWTLGGVPHDHRTDSLSAAFKNLDQSAQSDLTDRFDALCRHYGMMPTRNNKGVAHENGSIESPNGHLKRAIEDALVMRGVRDFEDLAAYRRFIDEIVGRINARNGKRIDMERPSLRPLPARRTTDYEEVTLRVTSSGGLTLRKVFYTVPSRLIGHHLRIRLYDDRLELFLGGTSLLTLPRGRASSSGSHGHVVNYHHVIHSLRKKPMALMGLVYRDQLFPRRAFGDMFAVLLEQTGEKKACRMTVDLLALAHDRGCEAELAAQIEEDLRQNRPPDMAALRALFSPPVEALPKVEVRMADLSSYDQLVGDAASAEEVAA

SEQ ID NO: 441 - protein, 490 aa, synthetic construct
MKMRQTVSPRSAAACAAFSTATAYRLEADMRLPSQRKAPRGRRRPDPLADIFDSEVVPLLESAPGIRAVAVFEEMQRRHPELPDGVRRTMERRIRSWRALRGPDRDVMFRQVHEPGRMGLSDFTDMADLGVRIAGVGLDHRLYHFRLACSGFEHAHVILGGESYVALAEGLQNALWALGGAPREHRSDSLSAAFRNLDASAREDLTRRYDALCRHYRMEPTRNNRGVAHENGAIESAHAHLKAAVRDALLMRGSADFDELAEYRRFIDEIVARKNARSAKRIDAERAVLQSLPGLRTSDYEEVLVMVTSSGGFTLRKVFYTVPSRLIGHRLRVRLYDDRLELFLGGTPLFTLPRGRADRKGKHDHVVDYRHVIHALRRKPMALLNLVYRDQLFPREAYRRMFDRLIDRLADRMACRTMVELLSLAHERACEAELAGVLESLLATPQGMPDMAALRARFAPDPAALPEVIVELAPLSAYEALLAPRAEEMA

SEQ ID NO: 442 - protein, 492 aa, synthetic construct
MIDYETYMKIKSYHEKDGLNCNQIAGIMGLSFKTVNKWLNQKRYHMRKSTGRSSKLDPFKNQILQMLEKYPYSAAQIFLRIKDNGFDGGSTIVQDYVRKIRPPKTKAYLKLSFAPGECAQVDWGSYGSVNVGSTRRRLSFFAMVLCYSRMMYVEFTVSQTMEHFLACHQNAFDFFGSVPQKIMVDNLKSAVLKRIVGQAPVFNPKYFDFANHYGFAIAACNVGAGKEKGRVENGVGYVKKNFLAGLDIPDFAAIHPAARHWLDAIANVRIHGETRQKPVELFEKERSFLNALPANAFDVATVSQVRASSQFRITVDANRYSVPAEYAGARLTLKTYPDRLCMYKDDKLIARHVRSYDRYLDFENPDHPKELLRQRKKARDQKIYMRFLTLSPKAEQYYRMLEQRRMNPRHHVQKIVALSEIYAPEAVARALDDAFTFQAFSCEYIANLLEQRSRSLPEPGALHLTRSEDLLDIDIEQPDLSIYERKGHEEKK

SEQ ID NO: 443 - protein, 489 aa, synthetic construct
MIDYELFCKIRHLKDHEGLSAHQIAGELAMDPRTVVKWLARERFCQRKAVPRSSKLDPFKAEIARLLQTHAFTAAQILMRIREQGFTGGYSIVKDYVRSIRPPKSRAYLTLAFAPGECAQVDWGCYGSVAVGNTRRRLSFFVMVLCYSRMLYLEFTVSQSLEHFLACHQNAFDFFGHVPKKIMVDNLKSAVLKRILGRPPVFNPRYLDFANHYGFTIAPCNVGRGNEKGRVENAVGYVKKNFLSGLEIPDFAALGPAARNWLEAVANVRLHGETRQKPVELFEAERPCLLPLAINAFDIATVSQQRASPQFRISCDTNRYSVPAEYAGRALTVKTDPERICVYAQDKLIARHIRSYERNLDFEDPDHPKALLAQRKKARDQKIFMRFIALSPKADLYYRKLAERRLNPQQHVRKIVALSEIYGTDPVGRAIEDAFIFEAFSSEYIANLLQQRARFHKEPAALHLTRREDLLDIRLEHPDLSVYERNTDE

SEQ ID NO: 444 - protein, 378 aa, synthetic construct
VDFAGKKLSYVDRQTGEVIACQVFVACLPYSDYSFAIAVETQNTGDFLYALSRCLESLGGVPKVLVPDNLKSAITKANKYEPGVNQAMEDFANHYGMAVVPARARKPKDKALVENQVRLIYSRVYAKLRNDTFFDLDSLNRAITQKVHDHNQTRMQQKPYSRQECFLANEKPLLEPLPRERFELKHYRQLKVAKNNHIYLGQDKHYYSVPYIHIGAAAHVIYTRSMVYIYISGRQVAVHQRNYKTGGYSTQKDHLCSHHRYYLERSPDYYIEKAKSKSEIFHRLIKAVFDQNRYPEQLYRTCDGYFNLQRNTDPGKFDKACSLALEFENYSYHFLSNVIKNNTIDQQQTKSRKNLPVHENIRGRQYYEQLNLKFYDAN

SEQ ID NO: 445 - protein, 493 aa, synthetic construct
MIDYETYVQIRNYFERDGLNYGQIAAALDLDQRTVARWANEKRYQSRKSPGRKSKLDPFKNDILRMIEKHPYSTAQIVQRIREMGFTGGKTIVADYVQRVRPPKTKAYLKLVFAPGECAQVDWGSYGAVRVGSTSRRLSFFVMVLCHSRMMYIEFTVSQTMEHFLGCHQNAFHFFGSVPQKIMVDNLKSAVLKRIVGRDPLFNPKYIDFADHYGFSIAACNVGKGNEKGIVENAVGYAKKNLLNGLDIPDFNIMKPMARQWLDTVANVRTHGETGKRPVDMFAEEKRSLQPLPVEPYDIGVIKQMRASRQFRVTIDTNHYSVPAQLAGVHLTAKMYPDRICLYHENKLVARHVRSYDRRQDFEHPDHPKELLAQRKKAKDQKIFMRFLALSAKSQEYYRQLEQRRMNPFHHIRQIVALSEIYSKEQVAMAIEDAFSFSAFSCEYIANLLEQRSRPVKEPGALHLTRSSDLLDLTIDYPDLSIYNFAIDEDDNE

SEQ ID NO: 446 - protein, 490 aa, synthetic construct
MIDYELFCKIRHLKEQEGLNAHQIAGELAMDPRTVAKWLTRERFCPRKASPRSSKLDPFKNEIARMLQTHAFTAAQILQRIRGQGFAGGYSIVKDYVRSIRPPKSPAYLTLAFAPGECAQVDWGCYGSVAVGNTRRRLSFFVMVLCYSRMLYCEFTVSQSMEHFLACHKNAFDFFGCVPKKIMVDNLKSAVLRRILGRPPVFNPKYLDFANHCGFTIAACNVGRGNEKGRVENAVGYVKKNFLAGLEIPDFAAIAPAARNWLETVANVRIHGETRKKPVELFEAERPCLLPLPINDFDIATVCPQRASSQFRITLDTNRYSVPAEHAGRALTVKTDPERICIYAGDDLIARHIRSYERYQDFEDPDHPKALLSQRKKARDQKIFMRFISLSPKADLYYRKLQERRLNPQEHVRKIVALSEIYGHEPVARAIQDAFVFEAFSCEYIANLLQQRARFHKEPSALHLTRREDLLDITLEHPDLSIYYERNTDD

SEQ ID NO: 447 - protein, 512 aa, synthetic construct
MNYLRDLINRLRAGESERRIARDLRLSRPTVHKYKLWADERGYLDPGQPLPDGASLLAALGPVAPPPQMTSSLAPYQDFVEQLLEQGVEMTAIWQRLRESHDYQGSYSAVRRLVQHLRPHQPEAFVRLQTTPGEEMQVDFGHAGQLFDPSCGRLRAAYVFVATLSYSRHQYAELVFDQKVPTWLALHRRAFESFDGVPQRVVPDNLKAAVLQALVHDPVLGEAYRRLALHYGFLISPTVPRTPRHKGKVESGVHYVKRNFLAGQQFVDLTAANQRLGVWVREVAGTRIHGTTRQAPLRLFAEYEQPALQALPGTPFTLLQIKPVKVHPDCHVVIDGSYYSVPYGYIEQTLEAHVSEQLVELYAGLELVATHLRANRPGQWQTRLEDYPPAKAAYLIQTPTYCRQAAARIGPATRQVVNQLLDERPLDRLRAVQAIVRLQESVGPARLEAACARALFYGDVRYRRIKDILNAALDRDPLPELTPPPPPSPARPFTFARASGDFFPPEPEGLVC

SEQ ID NO: 448 - protein, 487 aa, synthetic construct
VAKYREWAIAQHLLEGDMRDYQALHALAKDTLDVTPQPSQNRSSLEAYTEQIRALMERGLTATLIFHKLSEQPGFTGSRAAVWRITQKLKPATTPKVVLRIETPPGEVAQVDFGEVTPLFDPRTGTLRRTYCFVMVLAWSRHMYVEFVFDQKIPTWLLCHQHAFEFFGGVPKRIVLDNLKAAIVKAYTREQDPEVVRAYAECAEHYGFLIDPCLPAKPQHKGKVERGGVGYVKQSFTPLLAPNTSLCEANQRVPPWLLGRAGLRDHGTTHEAPLVRFARIERAALLPLPTQPYDPAVFKRVKLHRDGHVVFEKAYYSAPGEYVGQQLWLRAGLREIRLFSEDFELLVTHPRATRPGERLTKLDHFPPEQVEYFSPTRATWQTRADAIGTATSQVIAELLASRPLDKTRTVIRILKLADIYSPVRLEAACVRGLAFGDVRYVTLKHILAQHLEDVVLTPLPLPAVETLQFARPPSELTETILGGARWN

SEQ ID NO: 449 - protein, 518 aa, synthetic construct
MAGRRKNVLDVREIVRRLKLGQSERVIAQELLTSRNSIGKYRKLAIEEGWIARTDLPSPGEIELRLAAQKPNAIVFGPRSTVEPYREKVAKLYQAGVEIMAIWGLLREQDHFEGSYESVKRFVRRLPAPPPEAFVRMETDPGEEAQVDFGYAGMMFDPKTGRLRKAWVFVMTLAWSRHQYAEIVFDQKVETWIALHIRAFEFFGGQTKRVRPDNLKAAIIRAVIHDQEAQRSYREYAEFADFLISPCVPYAPRLKGKVEQGGVHYVKRNALAGRKFETADQNVHHANEHLRRWCLETAGVRTHGTTKEKPLARFEAERVALKPLPQTRYEIAVWAQAKLHPDCHVVFDNAYYSAPHRLIGKKLLVRATPDRVEIYYEHERLATHARATRPGERVSNIVHYPPTKLAGLLATPVRLREQAAQIGPKTAELIGKMLEEKPVDRLRAAQGILSLAKRNGPARLEAACRRALVFNLASFRTVKAILDKGLEDQPLPPEAVAQGPLPKTAQFARPIREIAAGL

SEQ ID NO: 450 - protein, 494 aa, synthetic construct
MKSRRTHAPAVAAAKAGFSRSTAYRIEADPRLPSQKKPLRARRRPDPLASVWMSEIVPMLEAAPGIRAVAVFGELLRRHPEMGEGVRRTLERRIRTWRALNGPEQEVIFRQQHPPGRLGLSDFTDMGDLSITIAGEPLDHRLYHFRLAFSGFEHAGVVLGGESFVALAEGLQNALWALGGAPEQHRSDSLSAAFRNLAPDAQEDLTQRYEALCAHYGMTPTRNNPGVAHENGSIESPHGHLKKVIEDELLLRGSRDFADLAAYRRFIDEVVGRRNARLRRQIEIERAVLKPLPMRRTTDYEEARVVVTSSGGFILKKVFYTVPSRLIGHWLNVRLYDDRLVCFLGSTEVLVLRRGRSPDHRKRAQVVDYRHVIHALRRKPMALLNLVYRDQLFPRAAYARAFEALLAGVGEKRACRTMVGLLALAHDRACEAELADAIEAELDAGRLPDLDQLRERFLPDAATIPDVVVELAPLSLYDELATVTTPAPAMEIAA

SEQ ID NO: 451 - protein, 523 aa, synthetic construct
MLTTEQINDLHRLYWSEHWPIRKIERQLNIGWRTIRKYLDAPAQAPVHRDRPSKLDPFKGAVAEWLEKDPGVSAAVIEQKLRAAGYRGGHSILREYVRNARPHIAPKRAFVRMEPLAGERFEVDWGHFGALSYSGDIRKLYAFALVDAHSRMLYVEFTHSQSFGTFARCHVHAFTALGGIAREIAYDNLATAVVEHEGRLVRFLPRFLAFARDYGFYPHACNPASGWEKGKIERAIGYLRQNFWPLREFTDLHDVNRQVRQWLAEVANQRVHRETRQRPLERFQPEALKPLPVIPYDYRDVTEALVHKDLRLAFDGNRYCVHQRYVGRRLIIKADSSSVTIYDRVEEVVSYPRSWRRGQTFGADRFEKILAEERPAARRSQAQRRLLDSLDGLCSPALVEAYLRDMAGSDRSLGRQISELLELIRQYGPEDVAGAIEKAAAARAFGADYIANILRQQRSPRRPQPPLRLRDPLLNELATDPISLLDYDAFILESGKECDDSPRTEAAATQPESHEPSGRGHDR

SEQ ID NO: 452 - protein, 488 aa, synthetic construct
MINYELFAKIKHLKEHEGLTAPQIAGELAIDVRTVRKWLDAAFRPKKITPRPSKLDPFKSDIVRMLETHPYTATQIFQRICEEGFDGGYSIVKRYVRKVRPPKSTAFLKLSFAPGECAQVDWGSYGAVDVGSTRRKLSFFVMVLCYSRMMYVEFTVSQTMEHFLGCHQNAFDFFGSVPKKIMVDNLKSAVLKRIVGQTPVLNPKYLDFANHYGFSIAPCNIGKGNEKGRVENAVGYVKKNFLAGLNIPDFSAIGPAARNWLDAIANVRIHGETRQKPLHLFEKERPFLNPLPVNPFDIATVSQVRASSQFRITIDTNRYSVPAEYSGTRLTLKTYPDRLCVYSKDKLIARHVRSYDRYQDFEDPDHPKELLNQRKKARDQKIFMRFLALSPKAEQYYRKLEQRRMNPHHHVRKIVALSEIYDPDAVARAMEDAFTFEAFSSEYITNLLEQRSRSLPEPGALHLTRREDLLQIKVGQPDLTIYERKHHE

SEQ ID NO: 453 - protein, 520 aa, synthetic construct
MPGTIIDMSKIKQVLQLSMNGISNRQIAKALSIDKETVNNYISKAKRETLSFKELIKLDDPVLERRFHFGNPAYSDERLQTFMELLPFFVEELSNKHVTRYNVWQNYREAYPNGYGRSQFFFHLGQNLEAKKKPSTVLYGSYNPGEKIFVDFAGDTLSYVNRDSGEIIKIQVFVASMPYTDYAFAMCVPSQKVEDFLYALRMCFEYLGGVPKIVVTDNLKSAVIKADKYEPTLNKALEDMGNHYGFVVIPCQPASPTQKALVENQVKLIYHRIYSKLRNRQFFSLQEINEAVWELLKAHNQTRMQQRTYSREEHFFSVEKGVLKPLPATPYQMRYYSDVTVQQNSHVYLSRDKHYYSVPYILIGRRAKIIYTNSIVKIFVNGEQVAVHPRIREYGFTTIKEHLASHSRAITERSPEYYKSRSKCLSEPLYTLISAIFDNTIASIPPEYYYRTCDMMLRLQKIYPANVFAQACGICIDNNIYSGKKLENIIKNLIHNSEQSSMSAPIPSGHVNMRGNNFFQ

SEQ ID NO: 454 - protein, 499 aa, synthetic construct
MPGKRITDHQVHKFKQYRRTLSQTAAAAKVGISERSARRVERSEVLPSQRPERQWRTRPDPLADVWDAEVVPLLQADPQLNGVTLFDELQRRHPGAFAPGVLRTLQRRIRQWRVVYGPEREVYFAQEHPPGHMALSDFTVADDLQIVIGGQAFPHLIYQFALAHSGWRHAQVIVGGESFVSLSNAMQMALWRLGGVPAEHRTDSLSAAFKNLTKEVVDDITRRYEDLCAHYGMTASRCNPGQSHENGSVESRHGSLKVALDQALRLRGSRQFDDQQAYEDFIQVVVNRMNQRVSKAARAEIAILNPLPLRKTSEYEELPARVSKYSVFTIRKALYSAPSQLIGHRILVRQYPSHIEVWQGGQCIIKRPKAVLRPGRTRPSHIDYRDLVGALKMKPGAFARWTLRDEAFPRDVYRLTWERLSQRCPERHACKTIVGLLDLAAQGYEAQLGALLQQLIDQDELPELKDLAERLKPAATAVPEVNIELPELAEYDYLLEATV

SEQ ID NO: 455 - protein, 249 aa, synthetic construct
MTVLSDKLTQLKLDFMAQELDSALADAAAKNLSPADTLEWLADLELDGRRGRSVERRFRLSKLQMRHGIESFSFNHHKTRQQMKAKILHLLDLEFIKQGTNIILIGNPGTGKTFLSKIIGWKACQANLRVLFTPAMQMLNQLVASQADHSLVRKLKIYTDPAILICDELGYLSLDQQTSNLFYQVISTRHAERRSTVITTNSIFSEWGNILFNTTIAAAIADRLVENSEVFLMGGLTWRNPRNGQTTAQ

SEQ ID NO: 456 - protein, 65 aa, synthetic construct
MTALNEKLSQLKLDFMAKELDRVLSDAAAKSLSPADTLEWLADMELDGRQGRSVERRFRLSKLQA

SEQ ID NO: 457 - protein, 95 aa, synthetic construct
MFNFSANHLFLLSRTEYLSCAVFLLQDLDTQRVYRLHDFTKALLIRPNVAYCVAGKVNSADKLYLVIESVRPDTKHPRLSTVPAPADGAGGSLIG

SEQ ID NO: 458 - protein, 244 aa, synthetic construct
MTELASKLEQLQLTSVARELDHLLSDAATKNLSHAETIEWLADVELEARWARSIERRFRLSRLQSKTGIECFDFNHHKTRIQLKSKILRLLDLDFITQGTNVVSIGNPGTGKTFLAKILGWRACQANYRILFTTTMNMLNQLAASQVDHSLVRRLKTYTAPSLLICDELGYLSLDQQTSNLFYQVISTRHAEHRSCIITTNLLCAAAHNRFNAESIVMRSPFSRGPAVGLRFLFCAPHNGARFQ

SEQ ID NO: 459 - protein, 252 aa, synthetic construct
MTALSEKLSQLKLDFMAKELDRVFTDAAAKSLSPADTLEWLADLELDGRQNRSVERRFRLSKLQARHGIESFNFNHHKSRQQMKSKILHLLDLDFIKQGTNIVLIGNPGTGKTFLSKIIGLKACQANLRVLFTPAMQMLNQLVASQADHSLVRKLKIYTDPAILICDELGYLSLDQQTSNLFYQVISTRHAERRSTVITTNTIFSEWGNILFNTTIAAAIADRLVENSEVFLLGGSTWRTPKNAQTPPKEYS

SEQ ID NO: 460 - protein, 91 aa, synthetic construct
MFNFSANHLALISRTEYRSCAVFVMRDDSTHRVYRLYDFTKAQQISPHGYYCISGKVNSADRLYLVIESVKPDTKHRRSSTAPAPSDGAED

SEQ ID NO: 461 - protein, 250 aa, synthetic construct
MSELNHKLDQLKLCSMCQELDHVLTDAATKNLSHAETLEWLADIELDGRRNRSVERRFHMSKLQAKVGIESFEFNHHKSRVQMKNKILRLLDLDFIAQGTNVVIIGNPGTGKTFLSKIIGWRACQANQRILFTTAMNMLNQLVASQVDHSLVRKLKVYTDPSLLICDELGYLSLDQQTSNLFYQVISTRHAEHRSTIITTNTPFSEWGNILFNTTIATAIADRLVENSEIYLLGGPSVRKPKRNQPADEE

SEQ ID NO: 462 - protein, 95 aa, synthetic construct
MFNFSANHLFLLSRKEYRSCAVLLLLDRDTQRVYRLHDFTKSHHLVPGQAYCVAGKVNSADKFYLVIESVRPDTKHARSSTSPLPSDGAGENPLA

SEQ ID NO: 463 - protein, 91 aa, synthetic construct
MFNFSANNLSLLSRTECRSCVVFVMKDHYTKRAYRLYDFTKSQQIAPDQLYCVFGKVNSADKLYLVMESVRPDTKNGNHSTDPARSDGAGK

SEQ ID NO: 464 - protein, 235 aa, synthetic construct
MSQKLEPTLKEAAAKNLSFVATLEALADLELEARNRRAVERRFQLSRLHAQPSIDTFHFQHHKSRMQSKSRILRLLDLNFLKDGTNVVLIGNPGTGKTYLAQILGWRACQANVRTLFTSAMDMLNHLLASQVDHSLVRKLRVYTEPTLLICDELGYLSLDQQTSNLFYQVISTRHSQHKSTVITTNTAFSEWGNILFNTTIATAIADRLVENSEIFLLGGESLRKAQKGQPPASA

SEQ ID NO: 465 - protein, 93 aa, synthetic construct
MFNFSANHLLLLSRMEYRSCVVFLMKDDSTRRVYRLYDFTKSQTITSDHYYCVSGKVNSADKLYLVIESVRRDTQHSPDPQLRLEWTVREKRP

SEQ ID NO: 466 - protein, 136 aa, synthetic construct
VSNLLQKLEQLQLTDICRELDHVLADAAAKNLSHAEALEWLADIELDGRHNRSIERRFRLSKLQSKTGIESFDFNHHKSRMQIKSKILRLLDLDFIAQGTNVIIIGNPGTGKTFLAKIIGWRVCQANTRVLFTTAM

SEQ ID NO: 467 - protein, 95 aa, synthetic construct
MFNFSANHLLLLSRMECRSCVVFVMRDDSTRRVYRLHDFSKSQIITPGQYYCVSGKVNSADKLYLVVESVKPDSKHSLPPNAPAPADGAGGSLMR

SEQ ID NO: 468 - protein, 167 aa, synthetic construct
MNELPRKLSLLKLSVMSRQLETILSEAAAKNLSAAATLEWLADLELEERRQHAIQRRFHLSHLQIQPTIEEFHFQHHKSRLQIKSKILRLLDLDFIHQGTNLVVIGNPGTGKTFLSKIIGWRACQANHRVLFTTAMDMLNHLLASQADHSLVRKLKLYTDPTLLICD

SEQ ID NO: 469 - protein, 78 aa, synthetic construct
MFNFSANNLTLLFRTECKSCVVFVMKDLHTKRLYRLYDFTKAQTITPDHLWCVWGKVNSADKLYLVIESVKTDAKNRV

SEQ ID NO: 470 - protein, 113 aa, synthetic construct
MSQKLEQTLKEAAAKNLSFAATLEALADLELEARNRRAVERRFHLSRLHAQPSIDTFHFQHHKSRMQSKSRILRLLDLNFLKDGTNVVLIGNPGTGKTYLAQILGWRACQATV

SEQ ID NO: 471 - protein, 110 aa, synthetic construct
MSDLLRKLEQLQLTGMCEALDHVLADAAAKNLSHAETIEWLADIELDGRHKRSIERRFRLSKLQAKVGIDSFDFNHHKSRMQMKNKILRLLDLDFITQGTNVIIIGNPGT

SEQ ID NO: 472 - protein, 95 aa, synthetic construct
MFNFSANHLFLLSRKEYRSCAVLLLVDRDTQRVYRLHDFSKTHHLVPGQAYCVAGKVNSADKLYLVIESVRPDTKHARPSTVPVDADGAGENPMH

SEQ ID NO: 473 - protein, 91 aa, synthetic construct
MFNFSANHLSLLSRNESSKCTVFVMKDLHTHRVYRLYDFTKSQIITPDHLYCVFGKVNSADKLYLVIESVKIDTKHELLSKLPIPSDGADR

SEQ ID NO: 474 - protein, 95 aa, synthetic construct
MFNFSANHLFLLSRKEYRSCAVLLLRDRDTQRVYRLHDFSKTHHLVPGQAYCVAGKVNSADKLYLVIESVRPDTKHARSSNVPVPADGAGENPVA

SEQ ID NO: 475 - protein, 166 aa, synthetic construct
MTLEEKLTQLRLMTMAQKLGTMTQEAANQNLSFVAALERLADLELEARHGHAIERRFKFSRLPAQPTLDQFQFTHHKTRQQAKNRLLHLLDLDFLQQGTNVVIIGNPGVGKTFLAQILGWRACQANVRVLFTTAMEMLNHLLASQVDHSLVRKLKVYTEPTALIVD

SEQ ID NO: 476 - protein, 82 aa, synthetic construct
MFNFSANHLFLLSRKEYRSCAVLLLRDRDTQRVYRLHDFTKTHHLVPGQAYCVAGKVNSADKLYLVIESVRPDTKHARPSTV

SEQ ID NO: 477 - protein, 70 aa, synthetic construct
MKDLHTKRVYRLYDFTKAQIITSDQLWCVSGKVNSADKLYLVIESVKTDSKTRVASSPQVNRDRAESDPM

SEQ ID NO: 478 - protein, 95 aa, synthetic construct
MFNFSANHLFLLSRKEYRSCAVLLLVDRDTQRVYRLHDFAKSHHLVPGQAYCVAGKVNSADKLYLVIESVRPDTKHARSSNVPAPADGAGEKHVA

SEQ ID NO: 479 - protein, 50 aa, synthetic construct
MTPLIDKLTRLNLDFMSRELDRVVIDSATRSLSHAETLEWLADLELEGRQ

SEQ ID NO: 480 - protein, 128 aa, synthetic construct
MTLLQQKLNQLNLATMSLHLDQTLTDASARNLSLAQTLEALLDRELEARHQRSIERRFKLSRLQSKPSIDSFHFNHHKSRLQLKTRILRLLDLDFLRNGTSVCLIGNPGVGKTYLAKIVGWRACQANQ

SEQ ID NO: 481 - protein, 249 aa, synthetic construct
MTSLQQKLQQLNLATMSLHLDQILTDTAAKNLSLAQTLETLIDRELESRHQRSIERRFKLSRLQSKPSIDSFHFNHHKSRLQLKTRILRLLDLDFLRNGTSVCIIGNPGVGKTYLARIVGWRACQANQRVLFTTAMDMLNHLLASQVDHSLIRKLKIYTEPALLLVDELGYLSLDQQTSNLFYQVISTRHSHKRSTLITTNTAFSDWGNILYNTTIATAIADRLVENSEIFLLGGESLRKGNKSQPPTE

SEQ ID NO: 482 - protein, 29 aa, synthetic construct
MSLHLDQILTDTAAKNLSLAQTLETLIDR

SEQ ID NO: 483 - protein, 249 aa, synthetic construct; identical to SEQ ID NO: 481

SEQ ID NO: 484 - protein, 95 aa, synthetic construct
MFNFSANHLFLLSRTEYQKCAVFLLRDLDTQRVYRLYDFTKALLLRPGVAYSVAGKVNSADKLYLVLESVRPDTKHSRSSNAPVPADGAGGSPIG

SEQ ID NO: 485 - protein, 95 aa, synthetic construct
MFNFSANHLFLLSRTEYQKCAVFLLRDLDTQRVYRLYDFTKALLLRPGVAYSVAGKVNSADKLYLVLEAVRPDTKHSRHSNAHAPVDGAGGSPIG

SEQ ID NO: 486 - protein, 95 aa, synthetic construct
MFNFSANHLFLLSRTEYRSCAVFALLDRDTQRVYRLFDFTRRLRLAPNRPYCVAGKVNSAGTLYLVIESVKPDTKHEWLSTTPVPADGAGGLPLP

SEQ ID NO: 487 - protein, 95 aa, synthetic construct
MFNFSANHLLLLSRMEYRTCVVFLMQDHSTRRVYRLYDFTRAHVIAPGEYYCVSGKVNSADKLYLVIESVKRDTKHSRDSAVPASADGAGGSLVK

SEQ ID NO: 488 - protein, 250 aa, synthetic construct
MTPLEQKLQQLNLKAMSRQAEATIADAAARNLSVSATLELLADMELEVRHSRAIERRFKCSRLQSQPSIDAFHFHHHKSRMQAKTRILRLLDLTFLKQGTNLVLIGNPGVGKTFLARVFGWKACQANQRVAFTTAMDMLNHLLASQVDHSLVRKLKTYTEPTLLIVDELGYLSLDQQTSNLFYQVISTRHSQKRSTIITTNTPFSDWGNILFNTTIATAIADRLVENSEIFLLGGDSLRKASRNSASPEE

SEQ ID NO: 489 - protein, 78 aa, synthetic construct
MFNFSANNLTLLSRTECKSCVVFAMKDLHTKRVYRLYDFTKAQTITPDQLWCVSGKVNSADKLYLVIESVKADAKNRL

SEQ ID NO: 490 - protein, 93 aa, synthetic construct
MFNFSANHLLLLSRMEYRSCVVFLMKDDSTRRVYRLYDFTKSQTITSDHYYCVSGKVNSADKLYLVIESVRRDTQHSPDPQLRLEWTVREKRS

SEQ ID NO: 491 - protein, 95 aa, synthetic construct
MFNFSANHLALLSRTEYPSYAVFLLQDLDTQRVYRLYDFTKAQLIPPNVAYCVAGKVNSAGKLYLVIESVRPDTRHARHSTAPVPADGAGGPAIG

SEQ ID NO: 492 - protein, 95 aa, synthetic construct
MFNFSANHLFLLSRKEYRSCAVLLLVDRDTQRVYRLHDFSKTHHLVPGQAYCVAGKVNSADKLYLVIESVRPDTKHARPSTAPSHADGAGENPMD

SEQ ID NO: 493 - protein, 95 aa, synthetic construct
MFNFSANHLLLLSRTEYQKCAVFLLRDLDTQRVYRLYDFTKSLLLRPGVAYSVAGKVNSADKLYLVLESVRLDTKHPLASTAPVPADGAGGSGIG

SEQ ID NO: 494 - protein, 181 aa, synthetic construct
MTTALSDKLTQLKLDFMAQELDSALADAAAKNLSPADTLEWLADLELDGRRGRSVERRFRLSKLQVKHGIESFNFNHHKSRQQMKSKILHLLDLDFIKQGTNIILIGNPGTGKTFLSKIIGWKACQANLRVLFTPAMQMLNQLVASQADHSLVRKLKIYTDPTILICDELGYLSLDQQTSN

SEQ ID NO: 495 - protein, 95 aa, synthetic construct
MFNFSANHLFLVSRTERPACAVFLMQDRDTQRLYRLYDFTKARLIRPGQAYCVAGKVNSADRLYLVIESVRPDTKHARRPTVRAPADGAGGSPMA

SEQ ID NO: 496 - protein, 95 aa, synthetic construct
MFYFSANHLFRILRTEYLSYAVLLIEDRDTQRVYRLYDFSQAQLIRPGVANCVAEKVNSADKLDLVIESVHPDTKHRRVSKSPVPAEGAGGLQLR

SEQ ID NO: 497 - protein, 95 aa, synthetic construct
MFNFSANHLVLISRTEYPSYAVLLMQDLDTRRVYRVHDFSKAQLIRPNVVYCVAGKVNSADKLYLVIESVRRDTKRRRVSNAPVPADGAGGSAVR

SEQ ID NO: 498 - protein, 95 aa, synthetic construct; identical to SEQ ID NO: 495

SEQ ID NO: 499 - protein, 95 aa, synthetic construct
MFNFSANHLFLLSRTVYPSCAVFVMLDRDTQRVYRLFDFTKRLRLTPNRPYCVTGKVNSVHTLYLVIESVKLDPKHERLSTTPVPADGAGGYGMR

SEQ ID NO: 500 - protein, 77 aa, synthetic construct
VRCPLWATGTLEGKAFRRSLKTRSFERAEKIKRQIEGGEAPKKSIPTMEGAIQRFLQDAEHGRKLQPATIKKYRVLL

SEQ ID NO: 501 - protein, 180 aa, synthetic construct
MSKPLSTANLQQKLQRLSLTTMCGHIEHALSEAAQKHWSPAATLEWLADIELGARQDRAIERRFRSARLNARQTIDSFQFSHHKSRQQAKPRILRLLDLDFLRQGTNVVIIGNPGVGKTLLAQIVAWQACQMNHRVLFTTAMDMLNQLHASQVDHSLVRKLRLYTEPALLVCDELGYLAL

SEQ ID NO: 502 - protein, 156 aa, synthetic construct
MTALTDKLINLKLNFMAKELDRVLTDAAAKSLSPAAAIEWLTDLELEGRQGRSVERRFRLSKLQAKHGIESFNFNHHKSRQQMKSKLLHLLDLDFIKQGTNIILIGNPGTGKTFLSKIIGWKACQANLRVLFTPAMQMLNQLVASQADHSLVRRLK

SEQ ID NO: 503 - protein, 56 aa, synthetic construct
MSQKLEQTLKEAAAKNLSFAATLEALADLELEARNRRAVERRFHLSRLHAQPSIDT

SEQ ID NO: 504 - protein, 69 aa, synthetic construct
MTRPRSAELPEHAVSDAAAAYIADTLMEIALQFEAAHFAQIRRHYESLRPEPDDNPGQQLDLFDKHPPF

SEQ ID NO: 505 - protein, 234 aa, synthetic construct
MSHHLETTLSEAAGKNLSAAATLEWLADMELEARRGRAIERRFKCSKLQTQPSIDAFHFAHHKSRSQNKNRVLRLLDLSFIANGTNLVLIGNPGVGKTFLSKIVGWRACQSNQRVLFTTAMDMLNHLLASQVDHSLVRKLKAYTEPALLICDELGYLALDQQSSNLFYQVISTRHSQKRSTIITTNTPFSDWGNILFNTTIATAIADRLVENSEIFLFGGDSLRKPKNPIPPAE

SEQ ID NO: 506 - protein, 95 aa, synthetic construct; identical to SEQ ID NO: 493

SEQ ID NO: 507 - protein, 167 aa, synthetic construct
MTALNDKLTQLKLDFMARELDRVVTDAAARSLSPAATLEWLTDLELEGRQSRSVERRFRLSKLQAKHGIESFNFNHHKSRQQMKSKLLHLLDLDFVKQGTNIILIGNPGTGKTFLSKIIGWKACQANLRILFTPAMQMLNQLVASQADHSLVRKLKIYTDPTLLVCD

SEQ ID NO: 508 - protein, 91 aa, synthetic construct
MFNFSANHLTLLSRTEYRSCAVFMVLDHSTHRVYRLHDFTKAHAMEQGSYYCVSGKVNSADKLYLVIESVKPDAKHNRSSIVPTPVDGAGK

SEQ ID NO: 509 - protein, 91 aa, synthetic construct
MFNFSANHLTLLSRTEYRSCAVFMVLDHSTHRVYRLHDFTKAHAMEPGSYYCVSGKVNSADKLYLVIESVKPDAKHNRSSMVPVPVDGAGR

SEQ ID NO: 510 - protein, 208 aa, synthetic construct
MTSLTDKLTQLKLNFMAKELDRVLTDAAVKSLSPSAALEWLTDLELEGRRGRSVERRFRLSKLQAKHGIESFNFNHHKSRQQMKSKILHLLDLDFIKQGTNIILIGNPGTGKTFLSKIIGWKACQANLRVLFTPAMQMLNQLVASQADHSLVRRLKAYTDPTLLVCDELGYLSLDQQTSNLFYQVISTRHAERRSTVITTNTIFSEWG

SEQ ID NO: 511 - protein, 95 aa, synthetic construct
MFNFSANHLFLLSRKEYRTCAVLLLVDRDTQRVYRLHDFTKAHYLVPGQAYCVAGKVNSADKLYLVIESVRPDTKHARSSNVPVPADGAGENPMA

SEQ ID NO: 512 - protein, 167 aa, synthetic construct
MTPLRDKLTQLKLDFMARELDRVLTDAAARSLSPADCLEWLADLELEGRQGHSIERRFRLSKLPARHGIESFNFNHHKSRQQIKSKILHLLDLDFVKQGTNIILIGNPGTGKTFLSKIIGWKACQANLRVLFTPAMKMLNQLVASQVDHSLVRKLKFYTDPTLLICD

SEQ ID NO: 513 - protein, 69 aa, synthetic construct; identical to SEQ ID NO: 504

SEQ ID NO: 514 - protein, 138 aa, synthetic construct
MIEKTALYPERVRKVTGSFAFIEHRFLKDGFFAGLTHHELLLYMFLVLVADRQGLSYYGFDKICTLLGISCEDYLFARNGLIEKDLVAFDGRLYQVLSLPDKPRGSHPEVLKTPHDMAKADPATIRQLIVKSLQRRQP

SEQ ID NO: 515 - protein, 135 aa, synthetic construct
MIAKKPLLPERIRGIEGSFAFIEHRFLRDGFVQHLSRHELLVYFFLVLAADRQGLSYYSYEKICSQLKLGLDDYIHARDCLIRRDLIAFDGRLFQVLSLPQAPVATAKPAKAPLGPQSPEQIGTIVSRLLGDRQC

SEQ ID NO: 516 - protein, 103 aa, synthetic construct
MIHKEILNPRRIRKINGSFAFIEHRFRGWIKYLSPEELLLYFFLVLASDEQGLSYYSSETIGSRLQLNPEQYRRALNGLITRDLLAFQEPLFQVLSLPERRSA

SEQ ID NO: 517 - protein, 129 aa, synthetic construct
MIEKRLLRPDRARKIAGSFATIEHRFLREGFWAELSHHELILYLFLIVVGDRHGLSYYSYDRICSLTGLLADEYILARDGLIHKDLIAFDGRLFQVLSLPCGSRTDRATVRQLIHQSLGGDHDHKTHRF

SEQ ID NO: 518 - protein, 120 aa, synthetic construct
MIHKKLLQPQRVRSIQGSFAFIEHRFLRDGFWADLDHHQLLLYFLLVLVADRQGLSYYSYDKLCSLLHISVDDYVAARNSLIEQDLIAFDGTLFQVLALPSSPVTNKVPHTSSGSLRRCP

SEQ ID NO: 519 - protein, 101 aa, synthetic construct
MIQKKLLLPERVRRIEGSFAFIEHRFLRAGFWRNLRPQERLLYVLLVLASDRQGLSYYSYDKLCSLLDITADDYIEARDGLIDQDLLGFRRHSLPGTLAPE

SEQ ID NO: 520 - protein, 135 aa, synthetic construct; identical to SEQ ID NO: 515

SEQ ID NO: 521 - protein, 135 aa, synthetic construct
MIAKKPLLPERIRGIEGSFAFIEHRFLRDGFVQHLSRHELLVYFFLVLAADRHGLSYYSYEKICSQLKLRLDDYIHARDCLIRRDLIAFDGRLFQVLSLPQAPVATAKPAKAPLGPQSPEQIGTIVSRLLGDRQC

SEQ ID NO: 522 - protein, 138 aa, synthetic construct
MIEKRILCHERVRRIGSSFAFIEHRFLRDGFLASLGHHELLLYVFLVLAADRNGISFYGYDRVCSLLRLTVEEYLEARNQLIEKDLIAFDGTLFQVLSLPEKPACKQKTLLKTSEDMERADPATIHQIFAKTFGGRPC

SEQ ID NO: 523 - protein, 113 aa, synthetic construct
MDKKIIVPDRIRKIQGSFGFIEHRFLQSGFWSSLNNQEILFYLFLVLVSDRNGISYYSYEKILSYLKISLEEYLLVRDSLIEKKLIAFDGQQFQVLSLPDKPVYLIFGREKND

SEQ ID NO: 524 - protein, 69 aa, synthetic construct; identical to SEQ ID NO: 504

SEQ ID NO: 525 - protein, 136 aa, synthetic construct
MFTKRILKEKRVRKIAGGFSFIPHRFLADGFLTSLAQQEILLYLFLVLAGDRYGLSYYSYDAICTLLQLNLGEYIAARDGLIDKDLIAFDGHIFQVLDLPSHPVKRAKSADDEDPAAIAQIIRQSLEYADQRRSLP

SEQ ID NO: 526 - protein, 132 aa, synthetic construct
MIMTRKRILNPGRVRQISGGFSYIPHRFLTGGFLASLDQKEILLYLFLVLVSDRHGLSYYSYDMICSLIQLTLDEYIEARDGLLKKDLISFDGKIFQVLDLPATPHFSAQSSGEDPAVVARTIRQSLAEASR

SEQ ID NO: 527 - protein, 141 aa, synthetic construct
MIDKKPLVPERIRGMEGSFAFIEHRFLRDGFVQHLSQHELLVYFFLVLASDRQGISYYGYEKICSQLKLLLDDYIHARDCLIRRDLIAFDGRLFQVLSLPRTPVVPEKPAKVPPGSQHSEQIGNILTRVLGGSNVRSANDL

SEQ ID NO: 528 - protein, 121 aa, synthetic construct
MIQKKLLHPERVRKIEGSFAVIEHRFLRDGFWTDLRHHELLLYLLLVLVADRNGLSYYSYDKLCSLLHFTVQDYIEARDALIDLDLLAFDGTLFQVLSLPNERRKRPAVPETAHRTSWGWP

SEQ ID NO: 529 - protein, 138 aa, synthetic construct
MISKKIINPERVRRIEGGFSFIPHRFITDGFLTFLTQKELLLYLFLVLVSDRYGLSFYSYDSICSLLQLSLDQYIEARNGLLEKDMISFDGTIFQVLDLPLKPTALSNPKLAFGCPHDNEDKDPATIASLIRQSIKEA

SEQ ID NO: 530 - protein, 137 aa, synthetic construct
MIHKAPLVPDRIRKIEASFAFIEHRFLRGGFWQSLNHHELLLYLFLVLVADRKGLSYYSYDKICTLLRISVDEYLPARDSLIEKDLLAFDGHLFQVLSLPKKPVIPTAKLLKTQQDMQKYDPATIGQLIVQSLGTDL

SEQ ID NO: 531 - protein, 138 aa, synthetic construct
MIAKTPLCPQRVRKIAGSFAFIEHRFLRDGFWDTLSHHELLLYLFLVLVADRNGLSYYGFDKICSFLEISTDEYLLARDALIKKDLIAFDGHLFQVLSLPQSPVVEKPKPLSTQKDMTRKDPATIRQLISKSLETRHD

SEQ ID NO: 532 - protein, 84 aa, synthetic construct
MREGFWASLDHHELLLYFLLVLVADHQGLSYYGYDKLCSLSRLPLDDYIPARDALIKKDLLAFDGTFFQVLSLPASPQTFRRSS

SEQ ID NO: 533 - protein, 136 aa, synthetic construct
VIEKTPLCPERVRKIRGSFAFIEHRFLKDGFFAALTHHELLLYVFLVLVADRQGLSYYGFDKICTLLAMSCDDYLFARNALIEKDLLAFDGRLYQVLSLPEKPRGSRPEALKTQHDMAKADPATIRRLIVKSLERA

SEQ ID NO: 534 - protein, 138 aa, synthetic construct
VIEKTPLCPERVRKIRGSFAFIEHRFLKDGFFAALSQHELLLYVFLVLVADRQGLSYYGFDKICTLLSISCDDYVAARNSLIEKDLLAFDGRLYQVLSLPVKPHTFRPELLRTREDMNKADPATIRRLIVKSLERAQP

SEQ ID NO: 535 - protein, 127 aa, synthetic construct
MRNIPILDRSRIRCIEGSFGFIPHRFLSDGFFTSLNHDELILYFFWVLVSDRFGMSFYGDKALAKHTGIEPADLSKIRDRLISKSLIAFKPPFVQVLQLPEQPVSKRPSPAEHPARRILKSLEGGVR

SEQ ID NO: 536 - protein, 103 aa, synthetic construct
MIKKELVTPRRIRKINGSFAFIEHRFRGWIKSLTPEELLLYFFLVLAADEQGLSYYRPETIGSRLQLSPDQYRQALNGLITRDLVAFQEPLFQVLSLPERRPA

SEQ ID NO: 537 - protein, 103 aa, synthetic construct
MIHKKLLNPRRVRQINGSFAFIEHRFRGWMKNLRPEELLLYFFLVLAADEQGLSYYRPETIGERLQLSPDQYRRALNGLITRDLVAFQEPLFQVLSLPERRPV

SEQ ID NO: 538 - protein, 135 aa, synthetic construct
MIAKKPLLPERIRGIEGSFAFIEHRFLRDGFVQHLSRHELLVYFFLVLAADRQGLSYYSYEKICSQLKLGLDDYIHARDCLIRRDLIAFDGRLFQVLSLPQAPVAPGKPAKAPLGPQHPEQIGNIVSRLLGDRQC

SEQ ID NO: 539 - protein, 121 aa, synthetic construct
MIQKKLLSPDRVRRIEGSFAFIEHRFLRAGFWRNLRPQERLLYVLLVLASDRHGLSYYSYDKLCSLLDITADDYIEARNGLIDQDLLAFDGTLFQVLSLPSEPIGRAVVAQGAYPDSRRWP

SEQ ID NO: 540 - protein, 103 aa, synthetic construct
MIKKKVLNPRRIRKIAGSFAFIEHRFRGWITYLSPEELLLYFFLALAADDRGLSYYAPETIGERLKLSPEQVQRALNGLITRDLVDYQEPLFQVLSLPERGRI

SEQ ID NO: 541 - protein, 135 aa, synthetic construct; identical to SEQ ID NO: 515

SEQ ID NO: 542 - protein, 126 aa, synthetic construct
MEKRVLNRSRIRSIDGSFAFIPHRFLTDGFLDMLSPPELLLYLFLVLAADANGLSYYGDKRTCRLLEMSQQELIRSREVLVDLDLIEYETPLYQVLDLPYIPEEIRDESFDAPVSSFSDLFRMTED

SEQ ID NO: 543 - protein, 138 aa, synthetic construct
VIEKAPLCPERIRRIRGSFAFIEHRFLKDGFFAGLSHHELLLYVFLVLVADRQGLSYYRFDKICTLLGISCDDYLFARNSLIEKDLLAFDGRLYQVLSLPEKPRGSRPEALKTQQDMAKADPATIRRLIVRSLERGQP

SEQ ID NO: 544 - protein, 139 aa, synthetic construct
MIERHPLMPDRLRKIGGSFAFIEHCFLRDGFWTALTQHELLLYFFLVLAADRWGLSFYGYDRICNLLRVPVDEYILARDGLIAKDLIAFDGRLFQVLSLPDTPCRQSVRLLVDRDDMLDRDPATIAQCIDACLRGDRHD

SEQ ID NO: 545 - protein, 108 aa, synthetic construct
MIEKQPLNPARIRKINGSFAFIEHRFRYFIKTLTHQELLLYLFLVLAADKQGLSYYSADTICACLKISLRPYLKARQALIRKDLIAFDGRFFQVLSLPFFTPLGGLHD

SEQ ID NO: 546 - protein, 108 aa, synthetic construct
MVEIKPILFSRMRKLNGRYAFIELRFRHFIPSLTPQEILLYLFLVLASEHQGLSAYSPETICACLKISLRQYLKARQSLIRKDLIAFEDPLFQVLSLPSFSPWEAADD

SEQ ID NO: 547 - protein, 103 aa, synthetic construct
MIHKKLLNPRRVRNINGSFAFIEHRFRGFLQYLSPEELLLYFFLVLAADEQGLSYYRPETIGSRLQLKPDQYRQALNGLITRDLVAFQEPLFQVLSLPERRSS

SEQ ID NO: 548 - protein, 121 aa, synthetic construct; identical to SEQ ID NO: 528

SEQ ID NO: 549 - protein, 280 aa, synthetic construct
MTDKDDKTAPDPNKVDAMKLSLMLTDLRLPTISQLWQSFARRADKEGWTAGRFLAALAEHELAERDRRRIERHLREAKLLPGKTLDSFDFNVVPMISKAQVNALAVGDAWLTQGANCLIFGPPGAGKSHLASAIGLALVENGYRVLFSRTTDLVQRMQVARRELALEALLARLDRFHLLILDDLAYVRKDQAETGVLFELISARYERRSLLITANQPFGEWNKVFPDETTAVAAVDRLVHHATILEMNVESYRRRAALEKSNRKRGRPANFATEKNTTKD

SEQ ID NO: 550 - protein, 124 aa, synthetic construct
VGRPGRQSNREGWSAERFLGALLEHEIAERETRRRQRNRVDSQLPNAKTLDLFEFDAVPTDSKAHVMALAEADSWIGQGHNLLAFGPPGVGKTHLIAGIGHALIDRGYKVLFVRTSELVQRLQA

SEQ ID NO: 551 - protein, 269 aa, synthetic construct
MKANDKVDAARVDLLLSELRLSGIKLVWSALAATADKEGWPAARFLAALAEQELADRGQRRFTRHLAEARLPPGKTLDVFDFDMAPMISKAQVQALAAGDAWLEKGANLLVFGPPGVGKSHLAAALGLALIENGWRVLFARTTDLVQKLQVARRDLALEAAIDKLDKYHLLILDDIAYVAKDQAETSVLFELISARYERRSLLITANQPFGEWGKIFPDQAMTLAAIDRLVHHATIFEINVDSYRRKAALKKAAGPGRPPARATIKTSS

SEQ ID NO: 552 - protein, 267 aa, synthetic construct
MSAHEAVTLPMLLTELRLPTVKRLWPALAEQSNREGWPAERFLTALLEHELNERETRRIDRHRVESMLPPDKRLSCFEFAAVPTVSKAHVTALIEGDSWLEQGANLLLFGPPGVGKTHLLAAMGHSLIERGYRVLYTRTSDLVQRLQAARRDLRLQAELAKLDRFDLLIADDFSYVRRDQAETSVLFELIAERYERKSIALAANQPFSGWDHVFAEAAMTLAAVDRLVHHATIFELNVESFRRRSALPGLAPAGQNDKPKTNINPKG

SEQ ID NO: 553 - protein, 277 aa, synthetic construct
MSHPASLPLLLKQLKLSSIAAHWEEYLDRAGQRNWSPAHYLAALCEEEINGRYSRRIARHQKESRLPPGKSLSSFDFSHLPEMNGGKIEALASDPSWVHRGENLLFFGPSGTGKTHLAAAICNGLIEQNVSVRYYQATALVQELQRARAELQLERSFARLDRYAVLVLDDIGYVKKSEGETHVLFELIAYRYESKSLIITANHPFSNWDQIFADSIMTVAAIDRLVHHAMIIEIEAQGGSYRKKQAINRHPHLLSQDHIGKMTTEKKEVFENGNGNF

SEQ ID NO: 554 - protein, 277 aa, synthetic construct
MSEASMTKPKTTITATTTGASTSARLGLMLTDLRLPTIKRLAGDLCAQSDLEGWPAHRLLEALLEHEINEREQRRVDRHRHESGLGPDKRLSSFDFAAVPSVSKAQVMALCEGTEWIDRGANVLLFGPPGVGKSHLISALGHALIEAGKRVLFTRCSDLVQRLQAARRDLRLPQELAKLDRFDLLILDDLSYVRRDQAETSVLFELISERYERKSLAITANTPFSQWGEVFVDPAMTIAAVDRLVHHSTILEMNVQSYRRRSAQAMATPVRKDSSTK

SEQ ID NO: 555 - protein, 269 aa, synthetic construct
MKANDKVDAARVDLLLSELRLSGIKLVWSALAATADKEGWPAARFLAALAEQELADRGQRRFARHLAEARLPPGKTLDVFDFDAVPMISKAQVQALAAGDAWLEKGANLLVFGPPGVGKSHLAAALGLALIENGWRVLFARTTDLVQKLQVARRDLALEAAIDKLDKYHLLILDDIAYVAKDQAETSVLFELISARYERRSLLITANQPFGEWGKIFPDQAMTLAAIDRLVHHATIFEINVDSYRRKAALKKAAGPGRPSARATIKTSS

SEQ ID NO: 556 - protein, 269 aa, synthetic construct
MKANDKIDAARVDLLLSELRLSGVKLVWNALAATADKEGWPAARFLAALAEQELADRGRRRFARHLTEARLPPGKALDAFDFDAVPMVSKAQVQALAAGDAWLERGANLLMFGPPGVGKSHLAAALGLALIENGWRVLFARTTDLVQKLQLARRDLALEAAIDKLDKYHLLILDDLAYVAKDQAETSVLFELISARYERRSLLITANQPFGEWGKIFPDHAMTLAAIDRLVHHATIFEMNVDSYRRKAAIKNSQGPGRPAVRATIKSSS

SEQ ID NO: 557 - protein, 267 aa, synthetic construct; identical to SEQ ID NO: 552

SEQ ID NO: 558 - protein, 279 aa, synthetic construct
MTENIDRARLMLMLNDLRLPAIKQNWPDFAERADKEGWPATRFLAALAEHEIAERDRRRLARHLAEAQLLPGKTLDSFDFDVVPMISKAHVMAICAGDSWIEKGANLILIGGPGGGKTHLASAIGLALVENGWRVLFTRTSDLVQRLQVARRELALEAAIARLDRFDLLILDDLAYVSKDQAETSVLFELISARYERRSTLITANQPFGAWGKVFPDPAMTLAAVDRLVHHATIFEINVDSYRRRAALERKQKGAGRPQSYATINDLEGVSLRDNQTKT

SEQ ID NO: 559 - protein, 264 aa, synthetic construct
MSKITADTARLPLMLSELRLPAISRLWQDIAARADKEGWPAARFLSVLAELEIAERVKRRIERHLVESRLPPGKTLDSFDFNTVPMLSKAHVMALASGDTWLATGANLLLFGPPGSGKSHVSAALGRALIENGYRVLFMRTTDLVQRLQVERQALQLAAAIARLDRFHLLILDDIAYVTKDQAETSVLFELIAARYERRSLMITANQPFGEWNKVFQDPAMTVAAIDRLVHHATIFEMNVESYRRRTAVGRKTKADRPSGDEPG

SEQ ID NO: 560 - protein, 267 aa, synthetic construct
MSDAITVDTARLPLLLGELRLPAFAKLWQAFTERADREGWPAARLLATLAELELAERAQRRIERHLLEARLPPGKTLASFDFASVPMVSHAHVTALASGDAWLKKGANILLFGPSGSGKSHLGAALGHALIENGYRVLFTRTTDLVQRLQTARQALSLESAIEKLDKYNLIILDDLCYVNRDQAETSVLFELIASRYERRSLLVTSNRPFGEWTTVFPDAAMTLAAVDRLVHHAVILEMNVQSYRQRSATSRQKQRAASDSKRDSKE

SEQ ID NO: 561 - protein, 269 aa, synthetic construct
MRAADPIDTARVELLLAELRLPAAKQVWTSLAAQADKEGWPAARFLAALAEHEMAERTRRRIERHLAEARLPPGKTIDSFDFEAVPVVSKAQVMALAAGDAWLNQGANLLLFGPPGGGKSHLAAALGFTLVENGWRVLFTRTTDLVQRLQIARRELTLEAAIAKLDKYHLLILDDLAYVTKDQAETSVLFELISARYERRSLLITANQPFGDWGKVFPDPAMTVAVVDRLVHHATIFEMNVESYRRRAALERKRSPGRPPVSATIKANA

SEQ ID NO: 562 - protein, 269 aa, synthetic construct
MRAADPIDTARVELLLAELRLPAAKQLWTSLAAQADKEGWPAARFLAALAEHEMAERTRRRIERHLAEARLPPGKTIDSFDFEAVPVVSKAQVMALAAGDAWLNQGANLLLFGPPGGGKSHLAAALGFTLVENGWRVLFTRTTDLVQRLQIARRELTLEAAIAKLDKYHLLILDDLAYVTKDQAETSVLFELISARYERRSLLITANQPFGDWGKVFPDPAMTVAVVDRLVHHATIFEMNVESYRRRAALERKRSPGRPPVSATIKANA

SEQ ID NO: 563 - protein, 178 aa, synthetic construct
MKANDKVDAARVDLLLSELRLSGMKLVWSALAATADKEGWPAARFLAALAEQELADRGQRRFARHLAEARLPPGKTLDVFDFDTVPMISKAQVQALAAGDAWLEKGANLLVFGPPGVGKSHLAAALGLALIENGWRVLFARTTDLVQKLQVARRDLALEAAIDKLDKYRVLQKHGGSA

SEQ ID NO: 564 - protein, 269 aa, synthetic construct
MKANDKVDAARVDLLLAELRLSGIKLVWSALAATADKEGWPAARFLAALAEQELADRGQRRFARHLVEARLPPGKTLDVFDFDTVPMISKAQVQALAAGDAWLEKGANLLFFGPPGVGKSHLAAALGLALVENGWRVLFARTTDLVQKLQVARRDLALEAAIDKLDKYHLLILDDIAYVAKDQAETSVLFELISARYERRSLLITANQPFGEWGKIFPDQAMTLAAIDRLVHHATIFEMNVDSYRRKAALKKAAGPGRPSARATIKTSS

SEQ ID NO: 565 - protein, 160 aa, synthetic construct
MLTVLRMPTVKRLLGDLCAQSDREGWPAMRLLEALLEHEVNEREMRRIDRHRAESMLSSDKRLSSFDFDLVPHISKAQVMALTEGTEWVDRGANILLFGPPGAGKSHLITGIGHSLIDAGKRVLFARCSELVQRLQAARRDLRLPAELNKLDRFDLLILD

SEQ ID NO: 566 - protein, 264 aa, synthetic construct
MSKITVDTARLPLLLHELRLPAISRLWQDIAARADKEGWPAARFLSALAEIEIAERAKRRIERHLDESRLPSGKTLDSFDFTTVPMLSKAHVMALASGDTWLGKGANLLLFGPPGSGKSHIAAGLGRALIENGYRVLFMRTTDLVQRLQEARQALQLAATIGKLDRFDLLILDDIAYVTKDQAETSVLFELIAARYERRSLLLTANQPFGEWNKVFHDPAMTVAAIDRLVHHATIFEMNVESYRRRTAIGRKTKTDPTPGDDAA

SEQ ID NO: 567 - protein, 269 aa, synthetic construct
MATSAATTTLTPTSARLGTMLTDLRLPTIKRLAGSLCAQSDMEGWPAHRLLEALLEHEINERESRRLDRHRAESNLSPDKRLSRFDFSAVPSVSKAQVMALAEGTQWLERGANVLLFGPPGVGKSHLVSALGHALIDAGRRVLFTRCSDLVQRLQAARRDLRLPQELAKLDRFDLLILDDLSYVRRDQSETSVLFELISERYERKSLAITANTPFSQWGEVFVEPAMTLAAVDRLVHHSTILEMNVESYRRRAAQQGLAPAQRKARSTN

SEQ ID NO: 568 - protein, 281 aa, synthetic construct
MTAPSQDAARNALMLTELRLPTIGRLWPEFAERSDKEGWPAARFLGGLLEHELAERAKRRIERHRAESQLDVTKTLASFDFAEVPMLSKAHVMALASGDAWLDKGATVLIFGPPGVGKSHVGCGIGHALIDAGHRVLYMRTSELVQRLQAARQSLQLPQALAKLDRYDLLILDDLSYVRKDQAETSVLFELIAERYERRSILITANQPFSGWNNVFPDPGMTVAAIDRLVHHSTIFELNKVESYRGKVAARQQQTQRANDKAKRRRQSSGDDDNQPTEVTP

SEQ ID NO: 569 - protein, 269 aa, synthetic construct
MRTTDPGDAARIELLLAELRLPAVKLVWASLAAQADKEGWPAGRFLAALAEHEIAERSRRRLERHLAEARLPPGKALDTFDFEAVPVISKAQVMALAAGDAWLNNGANLLLFGPPGGGKSHLAAALGFALVENGWRVLFTRTTDLVQRLQIARRELALEAAIAKLDKFHLLILDDLAYVTKDQAETSVLFELISARYERRSLLITANQPFGEWGKIFPDPAMTVAVVDRLVHHATIFEMNVESYRRRAALERKRGRGRPPIHATISANA

SEQ ID NO: 570 - protein, 276 aa, synthetic construct
MSGTPTIDTARLPMLLTQLRLPTVARLWRALTDTADRESWPAAKTLAALMEHEIAERARRRTARHLLEARLPAGKTLDCFDFTAVTSISKARVTALAEGDSWLDQGTNILLFGPPGVGKSHLAAALGHAMVDAGYRVLFTRTTDLVQQLQTARQELKLAAAIEKLDKYHLLVLDDLSYVQKSQAETSVIFELISARYERRSLLITANQPFGAWDAIFPDPAMTVAAIDRLVHHSIILEMNADSYRRKSAETKLRRKATGPAVKTAPSEPSSTAGVS

SEQ ID NO: 571 - protein, 270 aa, synthetic construct
MSGATITAGRLDLMLTELRLPTIKRLAEDLCAQSDREGWPAHRLLEALLDHEIAEREARRIDRHRAESCLQPDKRLSSFDFAAVPSVSKAQVMALAEGQEWLDRGANVLLFGPPGVGKSHLVCALGHALIDAGRRVLFTRCSDLVQRLQAARRDLRLPQELTKLDRFDLLILDDLSYVRRDQAETSVLFELIAERYERKSLAITANTPFSQWGEVFVEPAMTLAAVDRLVHHSTILEMNVESYRRRSAQADQPARQRARSTTNTAAAEHG

SEQ ID NO: 572 - protein, 269 aa, synthetic construct
MNATEKIDAARIDLALSELRLPGIRLIWAALAATADKEGWPAARFLAALTEQEMVERRRRRFERHREEARLPPGKTLDTFDFTAVPMISKAQVQALTAGDAWLEKGANLLCFGPPGGGKSHLAAAFGLALIEKGWRVLFTRTTDLVQKLQIARRDLALEAAIAKLDKYHLLILDDLAYVTKDQAETSVLFELISARYERRSMLITANQPFGEWGKIFPGQAMTLAAIDRLVHHATILEMNVESYRRKEAVDSARGVARPPIRSTIKASS

SEQ ID NO: 573 - protein, 103 aa, synthetic construct
MSGTPTIDTARLPMLLTQLRLPTVARLWRALTDTADRESWPAAKTLAALMEHEIAERARRRTARHLLEARLPAGKTLDCFDFTAVTSISKARVTALAEGDSWL

SEQ ID NO: 574 - protein, 269 aa, synthetic construct
MTSNDIDATRLTLALNELRLPAIKALWPRFAEQADKEGWRAARLLSALVEHELAERDRRRVERHIVQARLLPGKTLDTFDFTAVPMLSKAHINAITAGDSWVGKGANILLFGPPGVGKSHLSSAIGLALIENGYRVLFTRTTDLVQKLQQARRDLALESAIAKLDKFDLLILDDIAYVTKDQAETSVLFELISARYERRSMLITANQPFGAWNTIFPDPAMTLAAVDRLVHHATIFEMNVESYRRKAAQKARGSSRPTKMNDTSDNNAA

SEQ ID NO: 575 - protein, 279 aa, synthetic construct
MTQSIDSARLTLLLNDLRLPAIKQGWSAFAERADKESWPAARFLAALAEHEIAERDRRRLARHLAEAQLLPGKTLDSFDFAAVPMISKAHVSAICAGDSWIEKGANLILVGGPGGGKSHLASAIGLALVEKGWRVLFARTSDLVQKLQLARRELALEAAINRLDRFHLLILDDLAYVSKDQAETSVLFELISARYERRSTAITANQPFGAWGKVFPDPAMTLAAVDRLVHHATIFEINVDSYRRRAALERKHKGAGRPPNRATISDLSPLSLPDNQTET

SEQ ID NO: 576 - protein, 273 aa, synthetic construct
MLKQLRLTSMARHWQDLLGKAERNGWNSGQYLATLCEHELADRCSRRIARYRKESHLPVGKTLASFAFSEVPDLPSGQIQALAGSSDWTVQARNVLLFGASGVGKTHLAAAIGHGLTEQSVPVRYFVTTALVQHLQLARTQLRLEDALHKLDRYRTLILDDFGYVKKSEQETQVLFELIAHRYETGSLIITSNQPFAEWDRIFPDQMMTVAAVDRLVHHATIIEVCSDSYRRKEALGRIAGVAATTTAATATTKTSPPHTRSADIGLEPAPSA

SEQ ID NO: 577 - protein, 48 aa, synthetic construct
MKNAHSVDAARLGILLNELRLPAIKTLWPQFTEQADKEGWPAARFLTA

SEQ ID NO: 578 - protein, 214 aa, synthetic construct
MTSSQTDTARLTLALNELRLPAIKALWPRFTEQADKEGWPAARLLSTLVEHELAERDRRRIERHLAQARLLPGKTLETFDFAAVPMLSKAHVSAITSGDSWIGKGSNILLFGPPGVGKSHLGSAIGLALVEKGYRVLFSRTTDLVQKLQKARRDLVLESAIAKLDKFHLLILDDISYVTKDQAETSVLFELISARYERRSMLITANQPFGEWNT

SEQ ID NO: 579 - protein, 269 aa, synthetic construct
MTSSQTDTARLTLALNELRLPAIKALWPRFTEQADKEGWPAARLLSTLVEHELAERDRRRIERHLAQARLLPGKTLETFDFAAVPMLSKAHVSAITSGDSWIGKGSNILLFGPPGVGKSHLGSAIGLALVEKGYRVLFSRTTDLVQKLQKARRDLVLESAIAKLDKFHLLVLDDISYVTKDQAETSVLFELISARYERRSMLITANQPFGEWNTIFPDPAMTLAAVDRLVHHATIFEMNVESYRRRAAEQAKGPGRPAQRATPANTKPD

SEQ ID NO: 580 - protein, 278 aa, synthetic construct
MTQDIDATKLTLMLNELRLPTIKQLWPTFAERSDKEGWPAARFLSAITEHEIAERDRRRIERHLAEAKLLPGKTLDTFDFDAVPMISKAQVMAICAGDSWLENGANLILFGPPGGGKSHLSSAIGLALVEKGWRVLFTRTSDLVQKLQVARRELALENAIHRLDRFDLLILDDLAYVAKDQAETSVLFELISARYERRSLLITANQPFGEWNRVFPDPAMTLAAVDRLVHHATIFEMNVESYRRRAAIDRKQHGAGRPAKVATIKNTGVSLPDNQVLT

SEQ ID NO: 581 - protein, 270 aa, synthetic construct
MSTTLSVDAARLELLLTELRLPAIKAMWSRIAEQSDKEGWPAARVLAALAEAEMADRGRRRIARHMAEAKLPEGKTIDSFEFELVPMISKAQVMALIAGDSWLKSGANLLLFGGQGAGKSHLAAAIGQGLVENGWRVLYTRTTDLVQRLQVARRDLALESALAKLDKYHLLILDDIAYVTKDQAETSVLFELIGTRYERRSMLITANQAFGQWGKVFPDQAMTLAAIDRLVHHATIFEMNVESYRRRKALERKRGPDRQPARATIKKDAD

SEQ ID NO: 582 - protein, 247 aa, synthetic construct
MLTVLRMPTVKRLLGDLCAQSDREGWPAMRLLEALLEHEVNEREMRRIDRHRAESMLSSDKRLSSFDFDLVPHISKAQVMALTEGTEWVDRGANILLFGPPGAGKSHLITGIGHSLIDAGKRVLFARCSELVQRLQAARRDLRLPAELNKLDRFDLLILDDLSYVKKDQAETSVLFELIAERYERRSLAITANTPFSQWGEVFVEPAMTLAAIDRLVHHSVILEMNVESYRRRSAQQGHAPAGRKKN

SEQ ID NO: 583 - protein, 279 aa, synthetic construct
MSATIDTSRLALLLNELRLPAIKHLWPQFTERSDKEGWPAARLLMALAEHEVAERDRRRIERHLGEAKLLPEKTLDNFDFAAVPMISKAQVSALCAGDGWLEKGANLLLFGPPGGGKSHLASAIGLALVEKGWRVLFARTSDLVQRLQIARREFGLEAAIQRLDRYHLLILDDLVYVTKDQAETSVLFELISTRYERRSVLITANQPFGEWGKVFQDPAMTLAAVDRLVHHATIFEMNVESYRRRAALARKKPGPGRTAHYATTKNVGPLTPSDNQTDT

SEQ ID NO: 584 - protein, 235 aa, synthetic construct
VGRPGRQSNREGWSAERFLGALLEHEIAERETRRRQRNRVDSQLPNAKTLDLFEFDAVPTDSKAHVMALAEADSWIGQGHNLLAFGPPGVGKTHLIAGIGHALIDRGYKVLFVRTSELVQRLQAARRDLRLPQELVKLDRYDLLVLDDLSYARRDQAETSVPFELIAERYERRSIAITANAPFSEWDQVFPDRAMTVAAVDRLVHHATILEMNVDSYRRRAAMPARRHRSEPKQP

SEQ ID NO: 585 - protein, 269 aa, synthetic construct
MSGATITAGRLGLMLTELRLPTIKRLAADLCGQSDREGWPAHRLLEALLEHELSEREARRIDRHRTESCLSPDKRLSSFEFAAVPSVSKAQVMALAEGQEWLDRGANVLLFGPPGAGKSHLVCGLGHALIDAGRRVLFTRCSDLVQRLQAARRDLRLPQELAKLDRFDLLILDDLSYVRREQAETSVLFELIAERYERKSLAITANTPFSQWGDVFVEPAMTLAAVDRLVHHATILEMNVESYRRRAAKAGHPVPRRTRSTTSTAAQQT

SEQ ID NO: 586 - protein, 118 aa, synthetic construct
MNAATLPAGRLELMLTELRLPTVRRLAADLCAQSDREGWPAHRLLEALVEHEMAERETRRIERHRVESCLSPDKRLSSFDFATVPAVSKAQVMALAEGQEWLTRGANVLLFGPPEHAT

SEQ ID NO: 587 - protein, 268 aa, synthetic construct
MNRATTTRTAADAARLPLMLGELRLPTMKRLWADLAEQSNREGWTAERFLGTLLEQEVNERETRRLARARLDSHLPPNKSLESFDFDAVTTISKAHITALAEADGWITQGHNLLAFGPPGVGKTHLIAGIGHGLIDQGYKVLFVRTSELVQRLQAARRDLRLPAELAKLERFDLLVLDDLSYARKDQAETSVLFELIAERYERKSIAITANTPFSAWDEVFPDKAMTVAAVDRLVHHSTILEMNVDSYRRRAALPASRQRSATTTTTQ

SEQ ID NO: 588 - protein, 269 aa, synthetic construct
MKANDKIDAARVDLLLSELRLSGVKLVWSALAATADKEGWPAARFLAALAEQELADRGRRRFARHLTEARLPPGKALDAFDFDAVPMVSKAQVQALAAGDAWLEKGANLLMFGPPGVGKSHLAAALGLALIENGWRVLFARTTDLVQKLQLARRDLALEAAIDKLDKYHLLILDDLAYVAKDQAETSVLFELISARYERRSLLITANQPFGEWGKIFPDQAMTLAAIDRLVHHATIFEMNVDSYRRKAAIKKSQGPGRLAARATIKSSS

SEQ ID NO: 589 - protein, 281 aa, synthetic construct
MSQTTQPIDAQRLTLILNDLRLPAIKHAWPDIAQRADKEGWPAARFLAALAEHEIAERDRRRIERHLGEARLPPGKTLDSFAFDAVPMISKAKVMAICSGDGWLEKGDNLILFGPPGGGKSHLAAAIGLALIENGWRVLFTRTSDLVQRLQVARRELALEAAIARLDKYHLLILDDLAYVTKDQAETSVLFELISARYEQRSTLITANQPFGEWGKVFPDPAMTLAAVDRLVHHATIFEMNVESYRRRAAVQRRTGAGRPPTYATIKTVEQASLRDNQTAT

SEQ ID NO: 590 - protein, 278 aa, synthetic construct
MSAASITTAATTTTTTTTTAATSARLGMMLTDLRLPTIKRLAGDLCAQSDLEGWPAHRLLEALLEHEINEREARRIDRHRNESGLSPGKRLSSFDFSAVPSVSKAQVMALTEGTEWIDRGANVLLFGPPGVGKSHLVSALGHALIDAGRRVLFTRCSDLVQRLQAARRDLRLPQELAKLDRFDLLILDDLSYVRRDQAETSVLFELISERYERKSLAITANTPFSQWGEVFVEPAMTLAAVDRLVHHSTILEMNVESYRRRAAQAGHAPPVRKARSST

SEQ ID NO: 591 - protein, 279 aa, synthetic construct; identical to SEQ ID NO: 575

SEQ ID NO: 592 - protein, 276 aa, synthetic construct; identical to SEQ ID NO: 570

SEQ ID NO: 593 - protein, 264 aa, synthetic construct
MSAPTYDTGSMGLMLNELRLPTIGRLWSDFAQRSDKEGWQASQLLGALFEHELAERAKRRLERHRVESQLDPTKTLATFDFNVVPMVSKAHVMALATGDAWLEKGATILLFGPPGGGKSHLGSAIGHALIDAGYRVLCTRTSELVQKLQVARKSLQLPSALAKLDRFDLIILDDLSYVRKDQAETSVLFELIAERYERKSILITANQPFSGWNDVFPDPGMTVAAIDRLVHHSTIFELNVESYRRRNANDKQKERRRQLPNDDH

SEQ ID NO: 594 - protein, 269 aa, synthetic construct
MKANDKVDAARVDLLLSELRLSGMKLVWSALAATADKEGWPAARFLAALAEQELADRGQRRFTRHLAEARLPPGKTLDVFDFDMAPMISKAQVQALAAGDAWLEKGANLLVFGPPGVGKSHLAAALGLALIENGWRVLFARTTDLVQKLQVARRDLALEAAIDKLDKYHLLILDDIAYVAKDQAETSVLFELISARYERRSLLITANQPFGEWGKIFPDQAMTLAAIDRLVHHATIFEINVDSYRRKAALKKAAGPGRPPARATIKTSS

SEQ ID NO: 595 - protein, 188 aa, synthetic construct
MNPKDPNAAIHDNLQQLKLGYIRDNYQSVAKLAARKQWQHVQYLGELVAAEADLKMQRAIKRRIQLARFPQIKTLEQFNWSWPKKINRLQIQNLFRLDFVKEKSNVVLLGGVGLGKTHLVIALGYQACLQGMSVMFSSAVDAVNNLVAAQAAGRLKMEMKKYRKPALLIIDELGYLPIDKTGADMLFQ

SEQ ID NO: 596 - protein, 249 aa, synthetic construct
MNNQHQQILQALQTLKLPWMRQNYEPLLEQAIKQQTSTLEYLHELLLGEAQARQERATERRIQAARFPVIKTLDTFNWQWPQSIDRPQVEHLSRLRFVENKHNAVLLGPVGVGKTHLATAIALQACHHGHKVLYINAIEAINDLITAQKQGRLKPAMRRYTTPHLLVLDEIGYLPIDKTGADLLFQIISARYEGGAILLTTNKAFKDWPSIFNNDSTLTSAVLDRLLHHCETVIIQGSSYRMRKTKDPQ

SEQ ID NO: 597 - protein, 166 aa, synthetic construct
MSDDLESNLKYLKLPFMREHHHSLAQQAAADGWSHQDYLEKLADGEAALRKDRSTQRRIRLACLPVIKTLDQFDWSWPEKINRLKIQQLFRLQFVKESANVIILGTVGLGKTHLASALAHTACLKGYTTLFATAVDVINTLAAAQSAGRMKQELKKYTRPALLVLD

SEQ ID NO: 598 - protein, 83 aa, synthetic construct
MNNQHQQILQALQTLKLPWMRQNYEPLLEQAIKQQTSTLEYLHELLLGEAQARQERATERRIQAARFPVIKTLDTFNWQWPQA

SEQ ID NO: 599 - protein, 248 aa, synthetic construct
MKNNDQLLQQNLGYLKLPFFRDNYDSFAKKAAQKQWDHIHYLSELTIAEVNLRRDRATERRIRQARFPQIKTLDQFKWGWPKKINRLQVQNAFRLNFIDNKSNIVFIGSVGLGKTHLATALGYQACLNGHKVLFSSAVDAVNSLVAAKNAGQLKQHLKKYEKPSLLILDELGYLPIDKAGADLLFQIVSKRYEQGSIIITTNRVFKDWPEIFNNDATMTSALLDRLLHHTETIMIEGQSYRMKDAVEN

SEQ ID NO: 600 - protein, 250 aa, synthetic construct
MKNKTLTDELIEQLVYLKLPWIREHYDALAAQAAEKSWTPVEFLAHLLEGESNLRMDRATERRIKAAHFPVIKTLEQFDWSWPRKINRPMVQDLFRLQFVENKHNVILLGGVGLGKTHIALSLAYQACLQGHRTLFASAADIINTLSAAQKAHRLKLEITKYLRPALLVIDEIGFMPIDKHGADLLFQVISQRYEQGAIVLTSNKAFKHWPSIFNNDSVVTSAILDRLLHHADTATIEGKSYRMKDRIDP

SEQ ID NO: 601 - protein, 243 aa, synthetic construct
MKDITEHLSYLKLPFVRENYEAIAKTAARKQWDHIQYLSELVELESNRRRDRCIKRRIKTARFPVIKTMDQFDWTWPKKINQAQVKNLFRLKCIEEKSNVVLIGSVGVGKTHIASALGYHACLKNNTVLFTSAIDAVNNLIAAQHAGQLKQELKKYLKPSLLIMDELGYLPIDKNGADLLFQIISERYERGSIIITTNRVFKEWPEIFNNDSTLTSALLDRLLHHTEAVLIEGDSYRMRKVKK

SEQ ID NO: 602 - protein, 59 aa, synthetic construct
MNTSATLTEQLAYLKLPFIRQHFDTLAQQAAQRQLAPLDFLAQLIEGEVHARQDRALQQ

SEQ ID NO: 603 - protein, 251 aa, synthetic construct
MTDKRESQSFIDQHLTYLKLSFMQDNYQEMAALASKKHWSHVDYLERLVEGEAAMRRDRFIERRIRLARFPVIKTLDQFTWSWPKNINRLQVQNLFRLNFIKDKSNVIFLGGVGLGKTHLASALGYAACLKGHSVLFATAIDVINTLTAAKSAGRMKQELKKYTRPALLILDELGFLPIDKAGADLLFQVFSLRYEQGALVITSNRAFKDWPEIFNNDSTLTSAILDRVLHHAETVLIEGKSYRMRDQIEP

SEQ ID NO: 604 - protein, 249 aa, synthetic construct
MNKEPQSLLDQNLRYLRLFFMQDNYQQMAEQAAKKHYSHVDYFEKLVEGEAAMLRDRSIERRIRLARFPVIKTLDQFNWSWPKSINRLQVQNLFRLTFIKEKSNVIFLGGVGIGKTHLASALGYAACLKGHSVLFATAIAVINTLTAAQAAGRMKQELKKYTRPALLILDELGFLPIDKKGADLLFQVFSLRYEQGALVITSNRAFKDWPEIFNNDSTLTSAILDRLLHHAETVLIEGKSYRMRDQIGP

SEQ ID NO: 605 - protein, 252 aa, synthetic construct
MTDKKKPPDTLLEQNLKYLKLSFMKDQYQDLAAQASKKHCSHVSYLEKLADGEAALRRDRSIQRRIRMARFPVIKTLDQFDWAWPKKINRLQVQNIFRMQLIKDKSNVIFLGGVGLGKTHLASALGYVACLKGETVLFATAVDVINTLAAAQKAGRLKQELKKYTRPALVILDELGFLPIDKAGSDLLFQVISGRYEQGALLITTNKTFKNWPEIFNNDSTLTSAILDRLLHHAETVIIEGKSYRMKDKIEP

SEQ ID NO: 606 - protein, 249 aa, synthetic construct
MSENNRRLDEHLKYLKLPFIREHYQPLAAQAAEKQLAHIDYLEKLADGEAGLRRDRTIQRRIQKARFPVIKTLDQFNWSWPKKLNRLQVKNLFRLQFIPDKANVIFLGGVGLGKSHLAVALGYQACLEGHPVLFATAIDIINTLSAAQASGRLKAELKKYTRPAVLILDELGFLPIDKAGADLLFQVISQRYEQGALVITSNRAFKDWPEIFNNDSTLTSAILDRLLHHAETVIIEGKSFRMKDSLPPQ

SEQ ID NO: 607 - protein, 135 aa, synthetic construct
MKEITEHLSYLKLPFMRENYETIGKTAARKQWDHIQYLSELVEQESNLRRDRCRKRRIKMARFPVIKTMDQFDWTWPKKINQAQVKNLFRLKCIEEKSNVVLIGSVGVGKTHIATALGYQACLKNNTVLFTSTID

SEQ ID NO: 608 - protein, 247 aa, synthetic construct
MNPLLQEHLSYLKLADVALQFEPLATEATAKRWSHVEYLRRLLEGECRARQQRAIERRVRDARFPVLKTLDQFRWDWPKKINELQVKNLFRLTFVEKKTNVIFMGGVGLGKSHLSAALGYEACQRGHSVLFTTAVDALNNLVAAQAAQRLKAELKRYLAPAVLVLDELGYLPLDKTGADLLFQIISQRYERGSLIITTNKAYKNWTEIFNHDAGITSAILDRVLHHAETVIIEGKSFRMKDQIEPPN

SEQ ID NO: 609 - protein, 247 aa, synthetic construct; identical to SEQ ID NO: 608

SEQ ID NO: 610 - protein, 242 aa, synthetic construct
MNDLTQQLSYLKLPYIRQHHENVAQLAARKQWTHVHYLSELIRQEAGLRKDRTIQRRIRMARFPVVKTLDQFNWSWPQKINQAQIQNLFRLKFIEEKSNVVFIGGVGLGKTHLASALGYQACLKGHTVLFTSAIDTINDLISAQHAGRLKQELKKYLKPVLIILDELGYLPINKNGADLLFQIISQRYEQGSIVITTNRVFKDWPEIFNNDSTLTSALLDRLLHHTEAVVIEGKSYRMKQAA

SEQ ID NO: 611 - protein, 53 aa, synthetic construct
MNKTTDNLTPLDRHLDYLKLHFFTDNYEPLAKKAAHKQWDHVHYLGELASAEA

SEQ ID NO: 612 - protein, 248 aa, synthetic construct
MSENNRRLDEHLKYLKLPFIREHYQPLAAQAAEKQLPHIDYLEKLADGEAGLRRDRAIQRRIRQARFPVIKTLDQFNWSWPKKLNRLQVKNLFRLQFIPDKANVIFLGGVGLGKSHLAVALGYQACLEGHSVLFATAIDVINTLSAAQAAGRLKAELKKYTRPAVLILDELGFLPIDKAGADLLFQVISQRYEQAALVITSNRAFKDWPEIFNNDSTLTSAILDRLLHHAETVIIEGKSFRMKDSLPP

SEQ ID NO: 613 - protein, 55 aa, synthetic construct
MSENNRRLDEHLKYLKLPFIREHYQPLAAQAAEKQLPHIDYLEKLADGEAGLRRD

SEQ ID NO: 614 - protein, 146 aa, synthetic construct
MTTTDHTKTGLDEKLSYLKLSYMRENYESLAKKAAQKQCTHVNYLTELATAEATLRQDRATKRRIRTARFPQIKTLEQFKWSWPKKINQLQVKNLFRLRFVDEQSNVIFLGGVGLGKTHLATALGYHACLTGHTVLFCSAVDAINN

SEQ ID NO: 615 - protein, 251 aa, synthetic construct
MNTTTDDQTPLDKHLDYLKLHFFRDNYEPLAKKAADKQWDHVHYLGELVSAEADQRKDRATERRIRAARFPQTKTLEQFNWNWPKKINRMQVENLFRLNFIKEKSNVVFLAGVGLGKTHLTTALGYQACLKGYSVLFISAVDAINNLIAAQTTGRLKQELKKYQKPSVLCIDELGYLPIDKTGADMLFQIVSKRYEHGSVIITSNRAFKNWPKIFNNDATLTSALLDRFLHHAETVLIEGDSYRMKDAVTD

SEQ ID NO: 616 - protein, 249 aa, synthetic construct
MNNQHQQILQALQTLKLPWMRQNYEPLLEQAIKQQTSTLEYLHELLLGEAQARQERATERRIQAARFPVIKTLDTFNWQWPQSIDRPQVEHLSRLRFVENKHNAVLLGPVGVGKTHLATAIALQACHHGHKVLYINAIEAINDLITAQKQGRLKPAMRRYTTPHLLVLDEIGYLPIDKTGADLLFQIISARYERGAILLTTNKAFKDWPSIFNNDSTLTSAVLDRLLHHCETVIIQGSSYRMRKTKDPQ

SEQ ID NO: 617 - protein, 249 aa, synthetic construct
MNPADAQLQTHLAQLKLAYVQEHYQSLADQAAQQHWTPVDYLSRLMEGEALRQMDRTVQRRMAAARFPVLKTLEQFNWSWPRKINRPQVQNLFRLAFLENHANVIFMGGVGLGKTHLAVALGYAACQQQHTVLYVTAVEVVNTLLAAQATHSLPDALKRYRRPRLLILDELGYLPIDKAGADLLFQVFSQRYERGSTLITTNQAYKNWLRIFNNDSTMTSAVLDRVLHHAETVPIEGKSYRMKDVIEEA

SEQ ID NO: 618 - protein, 249 aa, synthetic construct
MTKPATPELTQNLIYLKLPWIRENYEALAAEAAQKNWAHVEFLCRLLEGETHLRMDRATERRIKAARFPVIKTLEQFDWSWPKTINRPQIQNLFRLQFIEQKANVVFLGGVGLGKSHLAVALGYQACLQGHRTLFTSAADIINTLSAAQAAHRLKTELRRYLSPALLLIDELGFMPIDKHGADLLFQVISQRYEQGAIILTTNKAFKTWPVIFNNDSVVTSAILDRLLHHAETVALEGKSYRMKDRIEA

SEQ ID NO: 619 - protein, 249 aa, synthetic construct
MKSPESILAEQLAYLQLTYFKEHYQALADQGAREQWPPVQYLSRLVEGESVLRRDRATQRRVQAARFPVIKSLEEFQWTWPKKINRVQVQQLFRLHFIAEKKNLILLGGVGLGKTHLATALGYAACLAGHRVLFTTAIDIINTLVAAQAVNRLKAELKRYLGPATLIIDELGYLPIDKTGADLLFQVLSGRYERGSCIITTNLAFKHWAKIFNNDATLTSAVLDRLLHHAESVTIEGKSFRMKDQEPEE

SEQ ID NO: 620 - protein, 250 aa, synthetic construct
MKTKTNPHDLNLSLKYLNLYYMSEHHMELAEQASKKQWSHLDYIEKLTEGETAFKSDRSINRRIRLARLPAIKTLDQFDWSWPKKINRLKIQNIFRLGLIEDKSNVIFIGGVGVGKTHLASALVYSACLSGHSALFASAIDIVNNLSSAQSTGRMKQELKKYLKPDLLLIDELGYLPVDKNGADILFQALSLRYEKAATVITTNRVYKEWPGIFNNDSTLTSAILDRLLHHAETVIIEGPSYRMKDQLDK

SEQ ID NO: 621 - protein, 251 aa, synthetic construct
MTTKTRKDSELPEQLQYLKLTSILEHYQPEAKAAAEHQLGHVDYLARLVDGEAQLRQDRSIARRIKLARFPVIKTLEEFDWNWPKKINRLQVQNLFRLGFIEEKANVIFVGGVGLGKTHLCAALGHTACLKGHSVLFASAIDIINTLSAAQNTGGLKAELKKYLRPAVLIIDELGYLPIDKNGADLLFQVISHRYECGPIILSTNKEFKKWAPIFNNDSTLTSAILDRLLHHSEAVTIEGTSYRMKDQIEA

SEQ ID NO: 622 - protein, 251 aa, synthetic construct
MTTKTRKDSELPEQLQYLKLTSILEHYQPEAKAAAEHQLGHVDYLARLVDGEAQLRQDRSIARRIKLARFPVLKTLEEFDWNWPKKINRLQVQNLFRLGFIEEKANVIFVGGVGLGKTHLCAALGHTACLKGHSVLFASAIDIINTLSAAQNTGGLKAELKKYLRPAVLIIDELGYLPIDKNGADLLFQVISHRYECGPIILSTNKEFKKWAPIFNNDSTLTSAILDRLLHHSEAVTIEGTSYRMKDQIEA

SEQ ID NO: 623 - protein, 249 aa, synthetic construct
MTPNDLTRLDAQLHRLHLHYIQSHYQALATKAAEQQRSHLDYLEQLVEGEATMRENRSIERRIKNARFPVLKSLDDFQWSWPKKINRPQIQNLFRLAFIATQTNVVLIGNVGLGKTHLSIALGHAACLNGHSVLFTTAVDIINTLAAAQSAGTLKREFHRYLKPAVLIVDELGYLPIDKHGADLLFQIISQRYERAPMVITTNRAYKHWSQIFNNDSTLTSAILDRVLHHADTVIIEGKSFRMKDEIDE

SEQ ID NO: 624 - protein, 250 aa, synthetic construct
MTPSDQTQLDAQLQRLHLQYVQSHYLTLASKAAEQQRSHVDYLAQLVEGEFTTREMRSIERRIKSARFPVRKTLDDFQWSWPKKINRAQIQNLFRLDFIATCTNVVLIGNVGLGKTHLSIALGHAACTNGHSVLFTTAIDIINTLAAAQSAGQLKREIRRYVKPAVLIVDELGYLPIDKHGADLLFQIISERYERAPIVITTNRVYKHWAQIFNNDSTLTSAILDRVMHHVDTVVIEGKSFRMKDEVVEE

SEQ ID NO: 625 - protein, 252 aa, synthetic construct
MKLELFQQQLAGLQLPFTRENYATFAQEAAQKNWDHLQYLQHLVQGEFDQRRLRIIQRRIKEARFPVLKTLDQFHWDWPKKINRLAVQNLFRLGFIKDKANVIFLGTVGLGKTHLATALGYAACQEGHSVLFTNAINVINELSAAQKDGTLKRQFKKYLRPQVLVLDEVGYLPIDQRGADLLFQTISQRYERGSIILTTNKAFKQWPAIFNNDSTITSAVLDRLLHHAETIVIEGSSFRMKDQIETPTPSAN

SEQ ID NO: 626 - protein, 256 aa, synthetic construct
MGKNKIMDAKQIKTGLAAQLEFLGLPFMRDNYDTVANQAAQSGLCHVDYLAALADGETAMRRQRSIKRRIKLARFPVVKTLEQFRWSWPSSINRAAVQNLFRLKFIDDRTNVIMLGGVGMGKTHLATALGHAACLDGRSVLFTTAVDAINTLSAAQAANRLKAELKKYTAPSLLCLDELGFLPIDKHGADLLFQIISLRYEQGSLIITSNRAYKDWPGIFNNDSTLTSALLDRLLHHAETIVIEGKSYRMKDEMES

SEQ ID NO: 627 - protein, 254 aa, synthetic construct
MAKNTGETPIESGLIAYLELLGLPFMRSNYDLVAHQAAQESWSHVDYLAALADGEAGLRRERSIKRRIRLARFPVVKTLEQFKWSWPTAINRPAVQNLFRLKFIDEKTNVIILGGVGLGKTHLATALGYAACLQGKSVLFTTAIDAINTLAAAQAANRLKSELKRYLAPSLLCLDELGFLPIDKRGADLLFQIISLRYERGSVVITSNRAFREWPKIFNNDSTLTSAILDRLLHHAETILIEGKSYRMKGALES

SEQ ID NO: 628 - protein, 229 aa, synthetic construct
MSKNIATLEQQLDYLKLHNIREKYDKITRQASQKKWSHIDYLAKLIDGEAGARWDRSIQRRISQARFPVIKTLEQFRWSWPKTINRLAIQNIFHLKFIANKENIIFLGGVGLGKTHLATAIAYQACLRGDSVLFTTAIDVINSMSAAQSTGNLNNELKKYLRPKLLVLDELGYLPIDKAGADLLFQVISHRYERGSIIVTSNRAFKHWPEIFNNDSTLTSALLDRLLHH

SEQ ID NO: 629 - protein, 251 aa, synthetic construct
MNTITDGQTPLDRHLDYLKLHFFRDNYEPLAKKAADKQWDHVHYLDELVSAEADQRKDRATERRIRAARFPQIKTLEQFNWNWPKKINRMQVENLFRLNFIKEKSNVVFLAGVGLGKTHLATALGYQACLKGYSVLFISAVDAINNLIAAQTTGRLKQELKKYQKPSVLCIDELGYLPIDKTGADMLFQIVSKRYEHGSVIITSNRAFKHWPKIFNNDATLTSALLDRFLHHAETVLIEGDSYRMKDAITD

SEQ ID NO: 630 - protein, 243 aa, synthetic construct
MNLVDHLSYLKLPYIRENYETTGRTAARKKWDHIRYLSELVEQESNLRRDRTIQRRIRMARFPVLKTMDQFDWSWPKEINREQIQNLFRLNFIEEKSNIVFIGPVGVGKTHIATALGYQACLKNNTVLFTSAVDAVNNLIAAQHAGQLKQELKKYLKPSVLLMDELGYLPIDKTGADLLFQIISERYERGSIIITTNRVFKDWPQIFNNDSTLTSALLDRLLHHTEAIVIEGDSYRMRKIKEQ

SEQ ID NO: 631 - protein, 190 aa, synthetic construct
MSQSKETPKIDEQLQQQLAYLNLPFIQKNYEDFAAQAAAAQWPHVAYLSRLIAGEAAARQDRATLRRIQQARFPVIKTLESFDFTWPGKINRPQIQNLFRLKFLEDKANVIFVGGVGLGKSHLSIALAHAACLAGRRVLFTTAIDIVNTLSAAQNAGRFPQELNKYLKPDLLVMDELGYLPIDKRGADLL

SEQ ID NO: 632 - protein, 256 aa, synthetic construct
MTKSSDAPCQADMAALRAHLTALKLPYMLANHQALAQSAADKAWSHVHYLTELVSAEVSARHDRRVARLVAQARFPVLKTMDRFDWDWPTRINRLLVQNLFHLEFVHQHANVVLIAGTGLGKSHLMTALGHAACLQGYSVLFTGAIEIINNLALAQTTGTVKRALAQYVKPQVLCIDELGYLPIDKFGADCLFQIISHRYERGATLITTNRVYKQWPSIFNNDAVLTSALLDRLLHHAQTVVIEGKSYRPKDQIEL

SEQ ID NO: 633 - protein, 251 aa, synthetic construct
MTDKKESRSFIDQHLRYLKLYFIQDNYQELAAQAAKKHWAHVDYLEKLVEGEAAMRRDRFIERRIRLARFPVIKTLDQFKWSWPKNINRLQVQNLFRLNFIKDRSNVIFLGGVGLGKTHLASALGYAACLKGHSVLFATAIDVINTLTAARAAGRMKQELKKYTRPALLILDELGFLPIDKAGADLLFQVFSLRYEQGALVITSNRAFKDWPEIFNNDSTLTSAILDRLLHHAQTVVIEGKSYRMRDQIEP

SEQ ID NO: 634 - protein, 254 aa, synthetic construct; identical to SEQ ID NO: 627

SEQ ID NO: 635 - protein, 252 aa, synthetic construct
MTDDKKPPENLLEQNLKYLKLSFMKDQYQDLAAQASKKHWSHVSYLEKLADGEAALRRDRSIQRRIRLARFPVIKTLDQFNWNWPKKINRLQVQNIFRMQFVKEKSNVIFLGGVGLGKTHLASALGYMACLNGETVLFATAVDVINTLAAAQKAGRLKQELKKYTRPALMILDELGFLPIDKAGSDLLFQVISGRYEQGTLVITSNKAFKNWPEIFNNDSTLTSAILDRLLHHAETVIIEGKSYRMKDQIDS

SEQ ID NO: 636 - protein, 248 aa, synthetic construct
MEMTEAVLRAHLVRLQLPYFAQHQAELTAQAAREAWPPGHLLDQLVAGEVARRDEALVARRVKAARLPGIKTLDSFDWSWPKQINRAQVQHLFRLGFLPEHGNVILLGGVGVGKTHLAIALAHAACLQGETALFTSAVDIINALAAAQATGGIKREMARLMKPSLLVIDELGYLPIDKFGADGLFQVISQRYERGSTVITSNRAFKQWPEIFNNDSTLTSALLDRLLHHAESLVIEGRSYRMRETDDS

SEQ ID NO: 637 - protein, 243 aa, synthetic construct
MKEITEHLSYLKLPFMRENYETIGKTAARKQWDHIQYLSELVEQESNLRRDRCRKRRIKMARFPVIKTMDQFDWTWPKKINQAQVKNLFRLKCIEEKSNVVLIGSVGVGKTHIATALGYQACLKNNTVLFTSTIDAVNNLIAAQHAGQLKQELKKYLKPSLLIMDELGYLPIDKNGADLLFQIISERYERGSIIITTNRVFKEWPEIFNNDSTLTSALLDRLLHHTEAVLIEGDSYRMRKVKK

SEQ ID NO: 638 - protein, 243 aa, synthetic construct
MKEITEHLSYLKLPFMRENYETIGKTAARKQWDHIQYLSELVEQESNLRRDRCIQRRIKMARFPVIKTMDQFDWTWPKKINQAQVKNLFRLKCIEEKSNVVLIGSVGVGKTHIATALGYQACLKNNTVLFTSTIDAVNNLIAAQHAGQLKQELKKYLKPSLLIMDELGYLPIDKNGADLLFQIISERYERGSIIITTNRVFKEWPEIFNNDSTLTSALLDRLLHHTEAVLIEGDSYRMRKVKK

SEQ ID NO: 639 - protein, 249 aa, synthetic construct; identical to SEQ ID NO: 616

SEQ ID NO: 640 - protein, 249 aa, synthetic construct
MNNQHQQILQTLQTLKLPWMRQNYEPLLEQAIKQQTSTLEYLHELLLGEAQARQERATERRIQAARFPVIKTLDTFNWQWPQSIDRPQVEHLSRLRFVENKHNAVLLGPVGVGKTHLATAIALQACHHGHKVLYINAIEAINDLITAQKQGRLKPAMRRYTTPHLLVLDEIGYLPIDKTGADLLFQIISARYERGAILLTTNKAFKDWPSIFNNDSTLTSAVLDRLLHHCETVIIQGSSYRMRKTKDPQ

SEQ ID NO: 641 - protein, 251 aa, synthetic construct
MATTDDTKNGLDEKLNYLKLSYMRENYESLAKRAAQKQWTHVNYLTELTIAEANLKKDRATQRRICAARFAQIKTLEQFKWSWPKKINQLQVKNLFRLNFVDQKSNVIFLGGVGLGKTHLATALGYHACLKGYTVLFCSAVDAINNLAAAQSAGRLKQELRKYHKPALVILDELGYLPIDKTGADLLFQIISHRYEQGSLIITTNRAFKDWPEIFNNDSTLTSALLDRLLHHTETIVIEGKSYRMKETIEN

SEQ ID NO: 642 - protein, 228 aa, synthetic construct
MNDLTQQLSYLKLPYIRQHHENVAQLAARKQWTHVHYLSELIRQEAGLRKDRTIQRRIRMARFPVVKTLDQFNWSWPQKINQAQIQNLFRLKFIEEKSNVVFIGGVGLGKTHLASALGYQACLKGHTVLFTSAIDTINDLISAQHAGRLKQELKKYLKPVLIILDELGYLPINKNGADLLFQIISQRYEQGSIVITTNRVFKDWPEIFNNDSTLTSALLDRLLHHTEA

SEQ ID NO: 643 - protein, 247 aa, synthetic construct
MKDDQLETYLLYLKLSYFQEHHQALAQEAAEKNWPPLDFLSRLVEGEALRRKDRATQRRIQAARFPVIKSLEQFNWTWPKKINRPHVQNLFRLSFLKDKSNVIFMGGAGLGKTHLSTALAYECCLAGHTVLFTTAIDIVNTLAAAQSTHRLKAELKKYINPDLVLIDELGYLPIDKIGADLLFQVFSQRYETGSTVVTTNQPYKNWPKIFNNDSTLTSAVLDRLLHHAETVIVEGRSYRMKDQIETP

SEQ ID NO: 644 - protein, 250 aa, synthetic construct
MNPNETLRLSEQLTRLHLSFLQENHRSFADQAAREQWTHLRYLGQLLDGETQRRQDRCVVRRIKAARFPLLKTLDQFDWNWPKKINRPQVQHLFSLGFLKDHSSVVLVGGVGLGKSHLAIALGHAACLEGHSVLFTTAVEAINTLAAAQAQHRLKAELKKFLAPSILVCDELGYLPIDKTGADLLFQIISGRYENGSTIITTNQIYKHWSRIFNNDSTITSAVLDRLLHHAETVIIEGKSYRMKDQIDPP

SEQ ID NO: 645 - protein, 242 aa, synthetic construct; identical to SEQ ID NO: 610

SEQ ID NO: 646 - protein, 249 aa, synthetic construct
MSEDNRRLDEHLKYLKLPFIREHYQGLATQAAEKQLPHIDYLEKLADGEAGFRRDSAIQRRIRQARFPVIKTLDQFNWSWPKKVNRLQVKNLFRLQFVADKANVIFLGGVGLGKSHLAVALGYQACLEGHTVLFATAIDVINTLSAAQASGRLKAELKKYTRPAVLVLDELGFLPIDKAGADLLFQVISQRYEQRALVITSNRAFKDWPEIFNNDSTLTSAILDRLLHHAETVIIEGKSFRMKDNLPAQ

SEQ ID NO: 647 - protein, 248 aa, synthetic construct
MTEDNRRLDEHLKYLKLPFIREHYQRLAVQAAEKQLAHLDYLEKLADGEAGFRRDRSTQRRIQQARFPVIKTLDQFNWSWPKKVNRLQVKNLFRLQFVADKANVIFLGGVGLGKTHLAAALGYQACLEGYSVLFATAIDVINTLTAAQAAGRMKAELKKYTRPAVLILDELGFLPIDKTGADLLFQVISQRYEQGALVITSNRAFKDWPEIFNNDSTLTSAILDRLLHHAETVIVEGKSYRMKDSIES

SEQ ID NO: 648 - protein, 251 aa, synthetic construct; identical to SEQ ID NO: 633

SEQ ID NO: 649 - protein, 244 aa, synthetic construct
MSDLPTQLSYLKLPYIRENYETMGKTAAHKQWDHIQYLSELIKQESNLRRDKAVQRRVKMARFPVLKTMDQFNWSWPQKVNQAQIKNLFRLKFIEEKSNVVFIGSVGVGKTHIASALGYQACLKNNTVLFTSAIDVINNLVAAQRAGLLKQELKKYLNPAVLVMDELGYLPIDKNGADLLFQIISERYERGSIIITTNRVFKDWPQIFNNDSTLTSALLDRLLHHTEAVVIEGKSYRMREVRKE

SEQ ID NO: 650 - protein, 43 aa, synthetic construct
MTDKKEPQSFIDQNLTYLKLSFMQDNYQEMAVQAAKKHCSHVD

SEQ ID NO: 651 - protein, 169 aa, synthetic construct
MAMTDALLAKHLGRLQLPYFAQHHQTLMAEAARESWPHGRFLEQLVVGEVARRDEALVARRVKAARLPGIKTLDGFDWSWPKKINRAQVQHLFRLEFLPQHGNVILLGGVGVGKTHLAVALAYAACLQGRMALFTSAVDIVNALAAAQATGGIKREMARLMKPSLLVVD

SEQ ID NO: 652 - protein, 168 aa, synthetic construct
MNTTDERTSLDRHLDYLKLHFFKDNYEPLAKKAAHSQWDHIHYLGELAAAEANQRKDRVTERRIRAARFPQIKTLEQFKWNWPKKINKMQVENLFRLNFIKDKSNVVLLAGVGLGKTHLATALGYQACLKGHSVLFTTAVDAINNLAAAQTTGRLKQELSKYQKPSVL

SEQ ID NO: 653 - protein, 232 aa, synthetic construct
MKTKQTARSELERNLQYLKLAYVPQHYNELAQKASQKELSHVEYLARLMAGEAALRHERSIARRIQLARFPVVKTLDQFSWSWPKSINRLQVQDLFRLQFIADKANVIFLGGVGLGKTHLATAVGYAACLKGYPVLFASAVDVINTLTAAQAAGRLKQELKKYTKPTLLILDELGYLPIDKAGADLLFQVISLRYEQGAMVITSNRAFKDWPEIFNNDATLTSAILDRLLHH

SEQ ID NO: 654 - protein, 251 aa, synthetic construct
MSDKKEPQCVIDQNLTYLKLSFMHDNYQQMAREAAKKHYSHVDYLERLAEGEAAMRRDHSIERKVRLARFPVIKTLDQFTWSWPKNINRLQVQNLFRLAFIKEKSNVIFLGGVGIGKTHLASALGYAACLKGHSVLFATAIDVINTLTAAQATGGMKQELKKYTRPALLILDELGFLPIDKKGADLLFQVFSLRYEQGAMVITSNRAFKDWPEIFNNDSTLTSAILDRLLHHAETVVIEGKSYRMKDNIES

SEQ ID NO: 655 - protein, 251 aa, synthetic construct
MKENREHNQLEEHLKYLKLPFIRDHYQDLATQAARKNWAHVDYLDNLISGEAALRRDRSIDRRIRMARFPLIKTLDQFNWSWPTKINRLHIQNLFRLNFVQDKSNLIFLGGVGLGKTHLASALGYAACLKNYTVLFTTAIGLINTLAAAHRQGRMKQELKKYTRPALLIIDELGFLPIDKKGADLLFQVISLRYEQGALLITSNKAFKDWPEIFNNDATLTSAILDRLLHHAETVLIEGKSYRMKDQIQEP

SEQ ID NO: 656 - protein, 254 aa, synthetic construct
MAKNTGETPIESGLIAYLELLGLPFMRSNYDLVAHQAAQESWSHVDYLAALADGEAGLRRERSIKRRIRLARFPVVKTLEQFKWSWPTAINRPAVQNLFRLKFIDEKTNVIILGGVGLGKTHLATALGYAACLQGKSVLFTTAIDANNTLAAAQAANRLKSELKRYLAPSLLCLDELGFLPIDKRGADLLFQIISLRYERGSVVITSNRAFREWPKIFNNDSTLTSAILDRLLHHAETILIEGKSYRMKGALES

SEQ ID NO: 657 - protein, 252 aa, synthetic construct
MTRRSDHDETVFHEQLDYLGLPFIREHYAESIREAAAAGADHLAPLMRLVEGEAALRKDRSVERRIRLARFPVRKTLDQFDWSWPRKLNRLQVQNLFRLQFLDDAANVVLIGGVGLGKSHLAIALGYTACQHGCSVLFASAIDIVNTLMAAKAGGRLKSELNRYVRPRLLLVDELGYLPIDKSGADLLFQIISQRYERGSTVVTTNRVYKKWPEIFNNDSTLTSAVLDRLLHHAETVTIEGKSYRMKDKIEE

SEQ ID NO: 658 - protein, 250 aa, synthetic construct
MTPSDQTQLDALLQRLHLQYVQSHYLTLASKAAEQQRSHVDYLAQLVEGEFTTREMRSIERRIKSARFPVRKTLDDFQWSWPKKINRAQIQNLFRLDFIATCTNVVLIGNVGLGKTHLSIALGHAACTNGHSVLFTTAIDIINTLAAAQSAGQLKREIRRYVKPAVLIVDELGYLPIDKHGADLLFQIISERYERAPIVITTNRVYKHWAQIFNNDSTLTSAILDRVMHHVDTVVIEGKSFRMKDEVVEE

SEQ ID NO: 659 - protein, 250 aa, synthetic construct; identical to SEQ ID NO: 658

SEQ ID NO: 660 - protein, 251 aa, synthetic construct
MNDKKEPPCLLDQHLRYLKLSFMQEHYQDLAAQAAKKHWSHLDYIEKLADGEAAMRRDRSIERRIRLARFPVIKTLDQFNWSWPKNINRLQVQNLFRLNFIKDKSNVIFLGGVGLGKSHLASALGYAACLKGHSVLFATAIDVINTLAAAKAASRMKQELKKYTRPALLILDEIGFLPIDKSGADLLFQIISLRYEQGALVITSNRAFKDWPEIFNNDSTLTSAILDRLLHHAETVVTKGKSYRMKEQIEP

SEQ ID NO: 661 - protein, 250 aa, synthetic construct; identical to SEQ ID NO: 658

SEQ ID NO: 662 - protein, 250 aa, synthetic construct
MMNNNDTTRLEAQLQQLHLHHIQNHYEALAGKAAEQQLSHVDYLAQLIEGEATLRENRSIKRRIDNAHFPVLKTLDTFQWSWPKKINRPQIQNLFRLAFMATQTNVVFIGNVGLGKTHLSIALGHAACLKGHSVLFTTAVDIINSLAAAQSAGQLKRELRRYLRPALLIVDELGFMPIDKHGADLLFQIISQRYERASMVISTNRAYKHWAQIFNNDSTLTSAILDRVLHHADTVVIEGKSFRMKDEVDQ

SEQ ID NO: 663 - protein, 252 aa, synthetic construct
MTDNVSPPDAPLDQHLKYLKLPFMREQHRPLAKQAAKKSWSHEDYLEKLADGEAALRKDRSTQRRIRLARFPVVKTLDQFNWTWPKKINRLQVQHLFRLQFIKPASNVIFLGGVGLGKTHLASALGYAACLRGYKVLFATAIDVINTLSAAQAAGRMKQELRKYTRPSLLILDELGFLPIDKAGADLLFQVISRRYEQGALVITSNRAYKDWPEIFNNDSTLTSAILDRLLHHAETVLIQGKSYRMKEQIEV

SEQ ID NO: 664 - protein, 243 aa, synthetic construct
MKDITEHLSYLKLPFVRENYEAIAKTAARKQWDHIQYLSELVELESNLRRDRCIKRRIKMARFPVIKTMDQFDWTWPKKINQAQVKNLFRLKCIEEKSNVVLIGSVGVGKTHIASALGYHACLKNNTVLFTSAIDAVNNLIAAQHAGQLKQELKKYLKPSLLIIDELGYLPIDKNGADLLFQIISERYERGSIIITTNRVFKEWPEIFNNDSTLTSALLDRLLHHTEAVLIEGDSYRMRKVKK

SEQ ID NO: 665 - protein, 243 aa, synthetic construct
MKEITEHLSYLKLPFMRENYETIGKTAARKQWDHIQYLSELVEQESNLRRDRCRKRRIKMARFPVIKTMDQFDWTWPKKINQDQVKNLFRLKCIEEKSNVVLIGSVGVGKTHIATALGYQACLKNNTVLFTSAIDAVNNLIAAQHAGQLKQELKKYLKPSLLIMDELGYLPIDKNGADLLFQIISERYERGSIIITTNRVFKEWPKIFNNDSTLTSALLDRLLHHTEAVLIEGDSYRMRKVKK

SEQ ID NO: 666 - protein, 244 aa, synthetic construct
MNDLSEHLSYLKLPFIRENHEALAKTAARKKWDHVHYLSELMTQEAKLKRDRAIQRRIKMARFPVIKTLDQFNWSWPQKINQAQIKNLFRLKFIDEKSNIVFIGSVGVGKTHIASALGYQACLKNHTVLFTSAIDAINNLIAAQHTGMLKQELKKYLRPALLIMDELGYLPIDKKGADLLFQIISQRYEQGSIVITTNRVFKEWPQIFNNDSTLTSALLDRLLHHTEAVVIEGNSYRMRKVKKK

SEQ ID NO: 667 - protein, 85 aa, synthetic construct
MSEDNRRLDEHLKYLKLPFIREHFQSFAAQAAEKQLAHVDYLEKLADGEAAFRRDRSIQRCIQQARFPVIKTLDQFNWSWPKKVN

SEQ ID NO: 668 - protein, 231 aa, synthetic construct
MNNDDLTKQLTYLKLPYIRENHEAVGKLAARKQWTHVHYLAELIKQEANLRHDRTIQRRIRMARFPVLKTLDQFNWSWPKKINRAQIQNLFRLKFIEDKSNVVFIGGVGLGKTHLASALGYQACLKGHTVLFASAIDTINNLISAQRAGVLKQELKKYLKPSLIVIDELGYLPIDKNGADLLFQIISERYERGSIVITTNRVFKDWPQIFNNDSTLTSALLDRLLHHTEAI

SEQ ID NO: 669 - protein, 229 aa, synthetic construct
MNNNDLIKQLTYLKLPYMRENHESVGKLAARKQWAHVHYLSELIKQEANLRHDRTIQRRIRMARFPVIKTLDQFNWSWPKKINQAQIQNLFRLKFIEDKSNVVFIGGVGLGKTHLASALGYQACLKGYTVLFASAIDTINNLISAKHAGALKQELKKYLKPSLIVLDELGYLPIDKSGADLLFQIISERYERGSIVITTNRVFKDWPKIFNNDSTLTSALLDRLLHHTE

SEQ ID NO: 670 - protein, 249 aa, synthetic construct
MKNETQALQENLTYLKLAWIRDHHSEEATTAAEKHRSHIDYLARLIEGETLQRRTRAIERRIKTARFPLVKTLDQFDWNWPSTINRQQIQNTFTLHFIEEKKNLIFLGGVGLGKTHLATALGHQACLQGHRVLFTSAAEIINTLTAAQAAHRLKEELKKYIRPDLLIIDELGFLPIDKQGSDLLFQIISHRYERGSILLTSNKSYKTWPEIFNNDSVITAAILDRLLHHCETICIEGQSYRMKDRIEPA

SEQ ID NO: 671 - protein, 252 aa, synthetic construct
MTDKKIIPPSPLMQNLKYLKLPFMRDHHQDLANQASKKHWSHLDYFEKLADGETAMRRDRAIERRIRTARFPVIKTLDQYNWTWPKKLNRLQVQNIFRLGFVENKSNVIFLGGVGLGKTHLATALGYSACLKGHTVLFTTAVDVINTLSAAQAAGRMKQELKKYTRPLLLVVDELGFLPIDKAGADLLFQVISQRYEQGALVITSNRAYKDWPEIFNNDSTLTSAILDRLLHHAETVVVEGNSYRMKDKIES

SEQ ID NO: 672 - protein, 251 aa, synthetic construct
MTDEKRPPDNLEQNLKYLKLPFMKDQYQDLAAQASQKHWSHVNYLEKLADGEAALRRDRSTQRRIRVARFPVIKTLDQFNWTWPKKINHLQVQNIFRLQFVKEKSNIIFLGGVGLGKTHLASALGYAACLKGETVLFATAVDVINTLAAAQKAGRMKQELKKYTRPALLILDELGFLPIDKSGSDLLFQVISGRYEQGALIITSNKAFKNWPEIFNNDSTLTSAILDRLLHHAETVVIEGKSYRMKDQIEH

SEQ ID NO: 673 - protein, 250 aa, synthetic construct
VNKKNNPHRLDQILKYLKLPYMRDQHQELAKTASYKQWSHLDYFEKLADGEAALRRDRSIQRRIRLARLPVIKTMDHFDWTWPKKINRLQVQNLFRLQFIENRSNVIFLGGVGLGKTHLASAMAYSACLKGNTVLFTTAIDVINTLSAAQAAGRMKQELKKYTQPTFLLIDELGFLPIDKKGADLLFQVISLRYERGAMAITSNRAYKDWPEIFNNDSTLTSAILDRLLHHAETVIIEGKSYRMKDQIDV

SEQ ID NO: 674 - protein, 110 aa, synthetic construct
MSENYRRLDEHLRYLKLPFIREHYPTLAAQAAEKQLAHIDYLEKLVDGEAGLRRDRAIQRRIQKARFPVIKTLDQFNWSWPKKLNRLQVKNLFRLQFIPDKANVIFLGGV

SEQ ID NO: 675 - protein, 248 aa, synthetic construct
MTEHNRRLEEHLKYLKLPFIREHCQTLATQAAEKQLPHIDYLEKLADGEAALRRDRSIQRRIQQARFPVIKTLDQFNWSWPKKVNRLQVKNLFRLQFVADKANVIFLGGVGLGKTHLAAALGYQACLEGYGVLFATAIDVINTLTAAQAAGRMKAELKKYTRPAVLILDELGFLPIDKAGADLLFQVISLRYEQGALVITSNRAFKDWPEIFNNDSTLTSAILDRLLHHAETVIIEGKSFRMKDTIES

SEQ ID NO: 676 - protein, 244 aa, synthetic construct
MNDLPTQLSYLKLPYIRENYETMGKTAAHKQWDHIQYLSELIKQESNLRRDKAVQRRVKMARFPVLKTMDQFNWSWPQKINQSQIKNLFRLKFIEEKSNVVFIGSVGVGKTHIASALGYQACLKNNTVLFTSAIDAINNLVAAQRAGLLKQELKKYLNPAVLVMDELGYLPIDKNGADLLFQIISERYERGSMIITTNRVFKDWPQIFNNDTTLTSALLDRLLHHTEAVVIEGKSYRMREVRKE

SEQ ID NO: 677 - protein, 248 aa, synthetic construct; identical to SEQ ID NO: 675

SEQ ID NO: 678 - protein, 248 aa, synthetic construct
MTTNNNTLDQTLKYLKLPYMRDQHQKLAGLASQNQWSHLDYFGKLADGEAAMRHDRSIRNRILAARFPVIKTMDQFNWTWPKNINRLQIQNLFRLQFIENKSNVIFLGGVGLGKTHLASALAYSACLKGNTVLFATAIDIINTLSAAQSAGHMKQELKKYTRPSLLLIDELGFLPIDKKGADLLFQVISLRYECGSIVITSNRAYKDWPEIFNNDSTLTSAILDRLLHHAETVIIKGKSYRMKDQIDE

SEQ ID NO: 679 - protein, 254 aa, synthetic construct
MAKNTGKTPIESGLIAYLELLGLPFMRSNYDLVAHQAAQESWSHVDYLAALADGEAGLRRERSIKRRIRLARFPVVKTLEQFKWSWPTAINRPAVQNLFRLKFIDEKTNVIILGGVGLGKTHLATALGYAACLQGKSVLFTTAIDAINTLAAAQAANRLKSELKRYLAPSLLCLDELGFLPIDKRGADLLFQIISLRYERGSVVITSNRAFREWPKIFNNDSTLTSAILDRLLHHAETILIEGKSYRMKGALES

SEQ ID NO: 680 - protein, 116 aa, synthetic construct
MTANQLQDPPLDRHLKYLKLPFMREQHHPLAKQAAKKNWSHEDYLEKLADGEATLRKDRSTQRRINQARFPVIKTLEQFNWTWPKKINRLQIQQLFRLQFVKKPANVIFLGGGGLG

SEQ ID NO: 681 - protein, 251 aa, synthetic construct
MTTTDHTKTGLDEHLNYLKLVYMSENYESLAKTAVQKQWTHVNYLTELTTAEANQKKDRATKRRIRAARFPQIKTLEQFKWSWPKTINQLQVKNLFRLSFIEQKSNVIFLGGVGLGKTHLATALGYHACLQGHTVLFCSAVDAINNLAAAQSAGRLKQELRKYHKPALVILDELGYLPIDKTGADLLFQIISHRYEQGSLIITTNRAFKDWPEIFNNDSTLTSALLDRLLHHTETVVIKGKSYRMKETIED

SEQ ID NO: 682 - protein, 248 aa, synthetic construct
MSENNRRLEEHLRYLKLPFIREHYQTLAAQAAEKQLAHIDYLEKLADGEAGLRRDRAIQRRIQKARFPVIKTLDQFNWSWPKKLNRLQVKNLFRLQFIPDKANVIFLGGVGLGKSHLAVALGYQACLEAHAVLFATAIDVINTLAAAQASGRLKAELKKYTRPAVLILDELGFLPIDKPGADLLFQVISQRYEQGSLVITSNRAFKDWPEIFNNDSTLTSAILDRLLHHAETVIIEGKSFRMKDSLPQ

SEQ ID NO: 683 - protein, 249 aa, synthetic construct
MTPTDLTRLDTQLQRLHLPYIHSHYQALATRAAEQQRSHLDYLEQLVEGEATMRENRSIERRIKNARFPVLKSLDDFQWSWPKKINRPQIQNLFRLAFIATQTNVVLIGNVGLGKTHLSIALGRAACLNGHSVLFTTAVDIINTLAAAQSAGRLKREFQRYLKPAILIVDELGYLPIDKHGADLLFQIISQRYERAPMVITTNRVYKHWSQIFNNDSTLTSAILDRVLHHADTVIIEGKSFRMKDEIDE

SEQ ID NO: 684 - protein, 248 aa, synthetic construct
MTEDNRRLDEHLKYLKLPFIREHYQGLAARAAEKQLAHIDYLEKLADGEAAFRRDRSTQRRIQQARFPVIKTLDQFNWSWPKKINRLQIQNLFRLQFVPDKANVIFLGGVGLGKTHLAAALGYQACLQAHSVLFATAIDVINTLAAAQAAGRLKAELKKYTRPAVLILDELGFLPIDKAGADLLFQVISQRYEQAALVITSNRAFKDWPEIFNNDTTLTSAILDRLLHHAETVIIEGKSFRMKDSIEP

SEQ ID NO: 685 - protein, 180 aa, synthetic construct
MKTNIDHLDSRLADLRLPFLQEHCRPLATTAAKNSLPHLDYLAQLIEGEAALRSERAAQRRIKAARFPVIKTLASFRWDWPKKINRLQVQDLFRLQFVHDKANVLLLGLVGLGKTHIATALGYAACEQGMSVLFANAIDVINTLHAAQTKGNLKSELRKYTTPSVLILDEVGYLPIDQRG

SEQ ID NO: 686 - protein, 248 aa, synthetic construct
MSEDNRRLDEHLKYLKLPFIREHFQSFAAQAAEKQLAHVDYLEKLADGEAAFRRDRSIQRCIQQARFPVIKTLDQFNWSWPKKVNRLQVKNLFRLQFVADKANVIFLGGVGLGKTHLAAALGYQACLEGHSVLFATAIDVINTLTAAQAAGRMKAELKKYTRPAVLILDELGFLPIDKAGADLLFQVISLRYEQGALVITSNRAFKDWPEIFNNDSTLTSAILDRLLHHAETVIVEGKSYRMKDTIES

SEQ ID NO: 687 - protein, 244 aa, synthetic construct
MKTADMLKSLQLAYPLENLAALTGRAAAEAWPHQDYLDRLLEGECQRREANAVARRLKEARFPLRKDLSGFNWSWPKKINRAQIQNLFRLAFLEDHTNVVFIGGVGMGKTHLATALGRQACEQGHTVLFATAVDIVNTLAAAQAAQRLRAELRRYTRPALLVVDELGYLPIDKLGADLLFQIFSQRYEHGSTVLTTNRTYKHWPGIFNNDATLTSAVLDRVLHHAETILIEGSSYRMKDRVTDV

SEQ ID NO: 688 - protein, 254 aa, synthetic construct
MNQDKNDKPTPDELHRQLGYLKLQFMQEHCEELAQQAAQNQWSHVEFLCRLIEGETAARQDRACQRRIRDARFPVLKTFEQFDFTWPTKINRLAVQNLFRLKFIQDKANAILIGGVGLGKSHLCIALGYAAAAAGFRVRFTTAVDIVNTLAAAHNAGRFVQELKKFTRPDLLVIDEVGYLPIDKHGADLLFQIISQRYECGSIVLSTNKVFKHWPSIFNNDATLTSAILDRILHHAETIVIEGKSYRMKDRIEP

SEQ ID NO: 689 - protein, 243 aa, synthetic construct
MKNITEHLSYLKLPFMRENYEAIGKTAARKQWDHIQYLSELVEQESNLRRDRCIQRRIKMARFPVIKTMDQFDWTWPKKINQAQVKNLFRLKCIEEKSNVVLIGSVGVGKTHIATALGYQACLKNNTVLFTSTIDAVNNLIAAQHAGQLKQELKKYLKPSLLIMDELGYLPIDKNGADLLFQIISERYERGSIIITTNRVFKEWPEIFNNDSTLTSALLDRLLHHTEAVLIEGDSYRMRKVKK

SEQ ID NO: 690 - protein, 249 aa, synthetic construct
VNDTETRLTEQLATLKLVAVAEQYASLATEAAQKQWPHVDYLARLIDAEAQRRQQLAIQRRIATARFPCLKTLDQFDWNWPKKINRTQVQNLFRLTFPKDKTNVIFMGGVGLGKTHLVSALAHEACLRGYSVRFTTAVDIINTLTAAQTVGRLKTELKRYLNPAILAVDELGYLPIDKIGADLLFQVISQRYEHGSILLTTNQPYKHWPRIFNNDSTLTSAVLDRLLHHAETVILEGKSYRMKDQIETP

SEQ ID NO: 691 - protein, 246 aa, synthetic construct
MNDDDLKKHLNYLKLPYTRDNYESAGKAAAHKQWTHVHYLSELIKQESGLRQDRIIQRRIRMARFPVVKTLDQFNWSWPKKINQAQIQNLFRLKFIEDKSNVVFIGGVGLGKTHLASALGYQACLKGHTVLFSSAIDTINSLISAQYAGALKLELKKYLRPSVMILDELGYLPIDKTGADLLFTIISERYERGSIIITTNRVFKDWPQIFNNDSTLTSALLDRLLHHKEAVVIEGKSYRMKEVKGE

SEQ ID NO: 692 - protein, 245 aa, synthetic construct
MTDDLESNLKYLKLPFMREHHHLLAQQALTDSWSHEDYLEKLADGEAGLRKDRSTQRRIRLACLPVVKTLDQFDWSWPKKINRLKIQQLFRMQFIKEPANVIILGAVGLGKTHLASALAYAACLKGHTALFATAIDVINTLAAAQTAGRMKQELKKYTRPALLVLDELGFLPIDKAGADLLFQVISQRYEQGAMVITSNKSFKDWPEIFNNDTTLTSAILDRLLHHAETVVIQGKSYRMKEKIEF

SEQ ID NO: 693 - protein, 250 aa, synthetic construct
MKTKTNPHDLDQTLKYLNLPYMSEHHKELAEQASKKQWTHLDYLEKLAEGETAFKSDRSTQRRIRLARFPAIKTLDQFDWSWPKKINRLKIQNIFRLGLIEDRSNVIFIGSTGVGKTHLASALAYSSCLNGHSALFASAIDIVNNLLSAQSAGRMKQELKKYLKPDLLLIDELGYLPVDKKGADILFQALSLRYEKAATVITTNRVYKEWPGIFNNDSTLTSAILDRLLHHAETVVIEGPSYRMKDQIDK

SEQ ID NO: 694 - protein, 251 aa, synthetic construct
MNTTQDNQPPLEQQFNYLKLYFFRDNYDVLAKQAAHKQWTHAHYLAELTNAEADQRRDRATLRRIRQARFPQIKTLEQFKWNWPTKINQLQVKNLFRLNFVNDKSNVVFLGGVGLGKTHLAIALGYQICLKGHTLLFTTAIDAVNNLLAAQTTGRLKQELKKYHQPSVLILDELGYLPIDKTGSDLLFQIISQRYEQGSIIITTNRAFKDWPKIFNNDATLTSALLDRLLHHTETVIIEGKSYRMKDVIEN

SEQ ID NO: 695 - protein, 248 aa, synthetic construct
MTKDNPRLDEHLKYLKLPFIREHYQSLATQAAEKQLAHVDYLEKLADGEAAFRRDRSIQRRIQQARFPVIKTLEQFNWSWPKKVNRLQVKNLFRLQFVADKANVIFLGGVGLGKTHLAAALGYQACLEGYGVLFATAIDVINTLTAAQAAGRMKAELKKYTRPAVLVLDELGFLPIDKTGADLLFQVISLRYEQGALVITSNRAFKDWPEIFNNDSTLTSAILDRLLHHAETVIVEGKSYRMKDSIEP

SEQ ID NO: 696 - protein, 185 aa, synthetic construct
MSENNRRLDEHLKYLKLPFIREHYQGLAVQAAEKHLPHIDYLEKLADGEAALRRDRSIQRRIRQARFPVIKTLDQFNWSWPKKLNRLQVKNLFRLQFIPDKANVIFLGGVGLGKSHLAVALGYQACLEGHSVLFATAIDVINTLAAAQTAGRLKAELKKYTRPAVLILDELGFLPIDKAGADLLF

SEQ ID NO: 697 - protein, 250 aa, synthetic construct
MNPNENLRLSEQLTRLHLSFLQENHRSFADQAAREQWTHLRYLGQLLDGETQRRQDRCVVRRIKAARFPLLKTLDQFDWNWPKKINRPQVQHLFSLGFLKDHSSVVLVGGVGLGKSHLAIALGHAACLEGHSVLFTTAVEAINTLAAAQAQHRLKAELKKFLAPRILVCDELGYLPIDKTGADLLFQIISGRYENGSTIITTNQIYKHWSRIFNNDSTITSAVLDRLLHHAETVIIEGKSYRMKDQIDPP

SEQ ID NO: 698 - protein, 249 aa, synthetic construct
MSENNRRLDEHLRYLKLPFIREHYQGLATQAAEKQLPHIDYLEKLADGEAAFRRDRSIQRRIRQARFPVIKTLDQFNWSWPKKLNRLQVKNLFRLQFIPDKQNVIFLGGVGLGKSHLAAALGYQACLEGHSVLFATAIDVINTLSAAQASGRLKAELKKYTRPAVLILDELGFLPIDKAGADLLFQVISLRYEQGPLVITSNRAFKDWPEIFNNDSTLTSAILDRLLHHAETVIIEGKSFRMKDSLPTQ

SEQ ID NO: 699 - protein, 248 aa, synthetic construct
MSENNRRLDEHLKYLKLPFIREHYQGLAVQAAEKQLPHIDYLEKLADGEAGFRRDRSIQRRIRQARFPVIKTLDQFNWSWPKKLNRLQVKNLFRLQFIPDKANVIFLGGVGLGKSHLAAALGYQACLEGHSVLFATAIDVINTLAAAQTAGRLKAELKKYTRPAVLILDELGFLPIDKAGADLLFQVISQRYEQGPLVITSNRAFKDWPEIFNNDSTLTSAILDRLLHHAETIVIEGKSFRMKDSLPQ

SEQ ID NO: 700 - protein, 246 aa, synthetic construct
MTTNNNTLDQTLKYLKLPYMRDQHQKLAGLASQNQWSHLDYFEKLADGEAAMRHDRSIRNRIRMARFPVIKTLDQFNWTWPKNINRLQVQNLFRLQFIENKSNVIFLGGVGLGKTHLASALAYSACLKGNTVLFATAIDIINTLSAAQSAGHMKQELKKYTRPSLLLIDELGFLPIDKKGADLLFQVISLRYECGSIVITSNRAYKDWPEIFNNDSTLTSAILDRLLHHAETVIIKGKSYRMKDQI

SEQ ID NO: 701 - protein, 248 aa, synthetic construct
MNPHDSHLSANLTYLKLAFIREHYQSLAAQAAEKQLPHIDYLEQLADGEAAHRRDRFTQRRIQQARFPVIKTLDQFNWSWPKKINRLQVKNLFRLQFIPDKANVIFLGGVGVGKTHLASALGYQACIEGHSVLFATAIDVINTLSAAQSTGRMKAELKKYSRPAVLILDELGFLPIDKAGADLLFQVISQRYEQGALVITSKRAFKNWPEIFNNDSTLTSAILDRLLHHAETVLIEGKSYRMKDTIES

SEQ ID NO: 702 - protein, 248 aa, synthetic construct
MNPHDSHLSANLTYLKLAFIREHYQSLAAQAAEKQLPHIDYLEQLADGEAAHRRDRFTQRRIQQARFPVIKTLDQFNWSWPKKINRLQVKNLFRLQFIPDKANVIFLGGVGVGKTHLASALGYQACIEGHSVLFATAIDVINTLSAAQSTGRMKAELKKYSRPAVLILDELGFLPIDKAGADLLFQVISQRYEQGALVITSNRAFKNWPEIFNNDSTLTSAILDRLLHHAETVLIEGKSYRMKDTIES

SEQ ID NO: 703 - protein, 246 aa, synthetic construct
MKHEPEELAILLRRLNLTTIAQHYEQMGQEAAREGRSPVEYLRRLAEAEDAARYERSVQRRTRAARLPFIKTLEQFDWSWPKCINRAQIQDLFRLRFIEQHTNVVLIGGVGLGKTHLALALAYSACLHNVPTLFATAVEIVNALSSAQAANTLARALKTYSAPRLLVIDELGYLPMDKRGADLLFQVISARYEHSATLITTNMVYKQWPRIFNNDATLTTAILDRLVHHCETVTIEGKSYRTKDES

SEQ ID NO: 704 - protein, 250 aa, synthetic construct
MKKKANPHELHQTLNYLNLPYMSNNHEELAQQASKKQWSHLDYLDNLAQGEAAFKNDRSTQRRVRLARLPTIKTLDQFDWSWPKKINRLQIQNIFRLQFIENKSNVIFIGGVGVGKTHLSSALTYSACLNGYSALFASAIDIVNTLSAAQNTGRMKQELKKYLKPDLLLIDELGFLPVDKKGADLLFQTISMRYENTATVITSNRAYKEWPGIFNNDSTLTSAILDRLLHHAETVIIEGPSYRMKDMIDK

SEQ ID NO: 705 - protein, 250 aa, synthetic construct; identical to SEQ ID NO: 704

SEQ ID NO: 706 - protein, 246 aa, synthetic construct; identical to SEQ ID NO: 703

SEQ ID NO: 707 - protein, 247 aa, synthetic construct
MKDDQIETYLLYLKLSYFQEHYQALAQEAAEKNWPPLDFLSRLVEGEALRRKDRATQRRIQAARFPVIKSLEQFNWTWPKKINRPHVQNLFRLSFLKDKANVIFMGGAGLGKTHLGTALAYECCLAGHTVLFTTAIDIVNTLAAAQSTHRLKAELKKYINPDLVLIDELGYLPIDKIGADLLFQVFSQRYETGLTIVTTNQPYKNWPKIFNNDSTLTSAVLDRLLHHAETVIVEGRSYRMKDQIETP

SEQ ID NO: 708 - protein, 249 aa, synthetic construct
MTPSDLTRLDAQLHGLHLHYIQSHYQALATKAAEQQRSHLDYLEQLVEGEATMRENRSIERRIKNARFPVLKSLDDFQWSWPKKINRPQIQNLFRLAFIATQTNVVLIGNVGLGKTHLSIALGHAACLNGHSVLFTTAVDIINTLAAAQSAGTLKREFHRYLKPAVLIVDELGYLPIDKHGADLLFQIISQRYERAPMVITTNRAYKHWSQIFNNDSTLTSAILDRVLHHADTVIIEGKSFRMKDEIDE

SEQ ID NO: 709 - protein, 250 aa, synthetic construct
MKTKTLTDELTDALVYLKLPWIRANYDALAAQAAAENFSHVEFLARLIEGESHLRMDHATERRIKAAHFPVIKTLEQFDWNWPRKINRPAIQNLFRLQFVKDKHNVIFLGGVGLGKSHLAIALGYQACLEGHRTLFASAADIINTLSAAQKAQRLKQEIAKYLRPALLVVDELGFIPIDKHGADLLFQVISQRYEQGALILTSNKAFKHWSSIFNNDSVVTSAILDRLLHHADTATIEGKSYRMKDRIEP

SEQ ID NO: 710 - protein, 250 aa, synthetic construct
MKKKNNPHRLDQILKYLKLPYMRDQHQELAKTASRKQWSHLDYFEKLADGEAALRRDRSIQRRIRLARLPVIKTLDQFDWTWPKKINRLQVQNLFRLQFIENRSNVIFLGGVGLGKTHLASAIAYSACLKGNTVLFTTAIDVINTLSAAQAAGRMKQELKKYTRPTFLLIDELGFLPIDKKGADLLFQVISLRYERGAMAITSNRAYKDWPEIFNNDSTLTSAILDRLLHHAETVIIEGKSYRMKDQIDV

SEQ ID NO: 711 - protein, 249 aa, synthetic construct; identical to SEQ ID NO: 606

SEQ ID NO: 712 - protein, 246 aa, synthetic construct
MNDDDLKKHLNYLKLPYTRDNYESAGKAAAHKQWTHVHYLSELIKQESGLRQDRIIQSRIRMARFPVLKTLDQFNWSWPKKINQAQIQNLFRLKFIEDKSNVVFIGGVGLGKTHLASALGYQACLKGHTVLFSSAIDTINSLISAQYAGALKLELKKYLRPSVMILDELGYLPIDKTGADLLFTIISERYERGSIIITTNRVFKDWPQIFNNDSTLTSALLDRLLHHTEAVVIEGKSYRMKEVKGE

SEQ ID NO: 713 - protein, 248 aa, synthetic construct
MTEHNRRLEEHLKYLKLPFIREHCQALATQAAEKQLPHIDYLEKLADGEAALRRDRSIQRRIQQARFPVIKTLDQFNWSWPKKVNRLQVKNLFRLQFVADKANVIFLGGVGLGKTHLAAALGYQACLESHSVLFATAIDVINTLTEAQAAGRMKAELKKYTRPALLILDELGFLPIDKAGADMLFQVISLRYEQGALVITSNRAFKDWPEIFNNDSTLTSAILDRLLHHAETVIIEGKSFRMKDAIES

SEQ ID NO: 714 - protein, 251 aa, synthetic construct
MNDKKEPQSLLDQHLRYLKLSFMQDHYQNLAAQAAKIHWSHVDYLEKLADGEAAMRRDRSIERRIRLARFAVIKTLDQFNWSWPKKINRLQVQNLFRLNFIKDKSNVIFLGGVGLGKTHLASALGYAACLKGNSVLFATAINVINTLTAAKAAGRMKQELKKYIRPALLILDELGFLPIDKAGADLLFQVISLRYEQGALVITSNRAFKDWPEIFNNDSTLTSAILDRLLHHAETVVIEGKSYRMRDQIES

SEQ ID NO: 715 - protein, 248 aa, synthetic construct
MKENNSQLEQHLKYLKLPFIRDHYNDLAAQAAKKNWAHVDYLDNLITGEAALRRDRSIERRIRMARFPLIKTLDQFDWSWPKKINRLQVQNLFRLNFIKDKSNVIFLAGVGLGKTHLASALGYAACLKNHTVLFATAIDLINTLAAANRQGRLKQELKKYTSPALVIIDELGFLPIDKKGADLLFQVISLRYEQGALVITSNKAFKDWPEIFNNDATLTSAILDRLLHHAETVLIEGKSYRMKEQIEP

SEQ ID NO: 716 - protein, 249 aa, synthetic construct
MNNQHQQILQALQTLKLPWMRQNYEPLLEQALKKQTGTLEYLHELLVGEAQARQERATERRIQAARFPVIKTLDTFNWQWPQDIDRPQVEHLSRLRFVENKHNAVLLGPVGVGKTHLATAIALQACHNGHKVLYINAIEAINDLITAQKKGRLKPAMRRYTTPHLLVLDEIGYLPIDKTGADLLFQIISARYERGAILLTTNKAFKDWPSIFNNDSTLTSAVLDRLLHHCETVIIKGSSYRMRKTKDPK

SEQ ID NO: 717 - protein, 244 aa, synthetic construct
MNDLPTQLSYLKLPYIRENYETMGKTAAHKQWDHIQYLSELIKQESNLRRDKAVQRRVKMARFPVLKTMDQFNWSWPQKINQAQIKNLFRLKFIEEKSNVVFIGSVGVGKTHIASALGYQACLKNNTVLFTSAIDAINNLVAAQRAGLLKQELKKYLNPAVLVMDELGYLPIDKNGADLLFQIISGRYERGSIIITTNRVFKDWPQIFNNDTTLTSALLDRLLHHTEAVVIEGKSYRMREVRKE

SEQ ID NO: 718 - protein, 58 aa, synthetic construct
MTKNKNSGETPIEPNLIAHLEFLRLTFMRENYEALAHQAAQKSRTHVDYLAALAEGEA

SEQ ID NO: 719 - protein, 243 aa, synthetic construct
MKDITEHLSYLKLPFVRENYEAIAKTAARKQWDHIQYLSELVELESNLRRDRCIKRRIKTARFPVIKTMDQFDWTWPKKINQAQVKNLFRLKCIEEKSNVVLIGSVGVGKTHIASALGYHACLKNNTVLFTSAIDAVNNLIAAQHAGQLKLELKKYLKPSLLIMDELGYLPIDKNCADLLFQIISERYERGSIIITTNRVFKEWPEIFNNDSTLTSALLDRLLHHTEAVLIEGDSYRMRKVKK

SEQ ID NO: 720 - protein, 109 aa, synthetic construct
MSENNRRLDEHLRYLKLPFIREHYQALAAQAAEKQLPHIDYLEKLADGEAAFRRDRSIQRRIRQARFPVIKTLDQFNWSWPKKLNRLQVKNLFRLQFIPDKANVIFLGS

SEQ ID NO: 721 - protein, 170 aa, synthetic construct
MSKTTDNQTPLDRHLDYLKLHFCRDNYEPLAKKAADKQWGHVHYLGELASAEADLRKDRATERRIRAARFPQIKTLEQFNWNWPKKINRMQVENLFRLNFINDESNVVFLGGVGLGKTHLATALGYQACLKGHSVLFVSAVDAINNLIAAQTTGRLKQELKKYQKPSVLC

SEQ ID NO: 722 - protein, 245 aa, synthetic construct
MSDDLESNLKYLKLPFMREHHHRLAQQAAADSWSHQDYLQRLADGEAALRKDRSTQRRIRLACLPVIKTLDQFDWSWPKKINRLQIQQLFRLQFVKEPANIILLGTVGLGKTHLASALAYSACLKGYTALFATAVDVINTLAAAQTAGRMKQELKKYTRPALLVLDELGFLPIDKAGADLLFQVISQRYERGSMVITSNKAFKDWPEIFNNDSTLTSAILDRLLHHAETVVIQGKSYRMKEKIDI

SEQ ID NO: 723 - protein, 249 aa, synthetic construct
MSEENRRLDEHLKYLKLPFIREHYQGLATQAAEKQLPHVAYLEKLADGEAALRRDRSIQRRIRQARFPVIKTLDQFNWSWPKKLNRLQVKNLFRLQFIPDKANVIFLGGVGLGKSHLAVALGYQACLEGHSVLFATAIDVINTLAAAQTAGRLKAELKKYTRPAVLILDELGFLPIDKTGADLLFQVISQRYEQGPLVITSNRAFKDWPEIFNNDSTLTSAILDRLLHHAETIVIEGKSFRMKDSLPTQ

SEQ ID NO: 724 - protein, 43 aa, synthetic construct
MTPTDPKRLDAQLRRLQLPYIKSHYQALATKVAEQQRSHLDYL

SEQ ID NO: 725 - protein, 250 aa, synthetic construct
MKKSNDQAQLEAQLLHMRLLYVRENYSALAQKAAEQQRSHVDYLAHLVEGEFAMRDERSTARRIRNARFPVIKTLEDFQWSWPKKINRPQIQNLFRLDFITTQTNVVLIGNVGLGKTHLLIALGRAACLAGHSVLFTTAIDIINTLTAAKSAGQLKRDIRRYVNPTLLCIDELGYLPVDKLGADLMFQVISQRYERAPTAFTTNRAYKHWSQIFNNDSTLTSAILDRVLHHVDTIVIEGKSFRMKDAIEE

SEQ ID NO: 726 - protein, 250 aa, synthetic construct
MNTTDERTSLDKHLDYLKLHFFKENYQPLAKKATHSQWDHIHYLAELTASEADQRKDRATKRRICAARFPQIKTLEQFKWNWPKKINKMQVENLFRLNFIKDKSNVVLLGGVGLGKTHLATALGYQACLKGHSVLFTTAVDAINNLAAAQTTGRLKQELNKYQKPSVLCIDELGYLPIDKTGADLLFQIISKRYEHGSVIITSNRAFKDWPKIFNNDATLTSALLDRFLHHADTVVIEGKSYRMKDVIDD

SEQ ID NO: 727 - protein, 244 aa, synthetic construct
MKIKKESHNLLDHHLEYLKLSFMRDHHQDLAAQAAEKHWSHLDYLEKLVDGEAALRRDRSIERRIRLARFPVIKTLDQFNWSWPKNINRLQVQNLFRLNFIKDHSNVIFLGGVGIGKTHLASALGYAACLKGNSVLFATAVDVINTLAAAQATGRMKQELKKYTRPALLILDELGFLPIDKAGADLLFQVISLRYEQGALVITSNRAFKDWPEIFNNDTTLTSAILDRLLHHAETVLIKGKSYR

SEQ ID NO: 728 - protein, 246 aa, synthetic construct
MNPSLLAQQLDYLKLPFLKAQYDDLAQQAAREPWTHVEYLARLIDGQYQQRRERAVALHVKAARFPVIKTLEQFQWDWLKKINRLQVQDLFRLQFLEHNANAIFLGNVGLVKTHLATALGYAACLEGHSVLFANAINVINQLSAAQKSSRLKSELRKYLRPRLLILDEIGYLPIDQHGADLLFQVISQRYERGSIVLTTNKPFKQWASIFNNDATLASAVLDRLLHHAETVVVEGTSYRMKDQIQT

SEQ ID NO: 729 - protein, 250 aa, synthetic construct; identical to SEQ ID NO: 704

SEQ ID NO: 730 - protein, 243 aa, synthetic construct
MKDITEHLSYLKLPFIRENYGAIAKTAARKKWDHIHYLTELVEQESNLRRDKCIQRRIKMARFPVIKTMDPFDWTWPKKINQAQVKNLFRLKCIEEKSNVVLIGSVGVGKTHIATALGYQACLKNNTVLFTSAIDAVNNLVAAQHVGQLKQELKKYLKPSLLIMDELGYLPIDKNGADLLFQIISERYERGSIIITTNRVFKEWPEIFNNDSTLTSALLDRLLHHTEAVLIEGDSYRMRKAKK

SEQ ID NO: 731 - protein, 70 aa, synthetic construct
MKDITEHLSYLKLPFIRENYGAIAKTAARKKWDHIHYLTELVEQESNLRRDKCIQRRIKMARFPVIKTMD

SEQ ID NO: 732 - protein, 252 aa, synthetic construct
MSKRTDVHTTLDRLLDHLAFHFMRQQYRSLAEEAARQQWDCLDYLCRLVEGEAAARHDRSVQRRIRLARFPVLKTLDDFDWTWPSKLNRAQVQQLFRLDFLRSHANVIFLGGVGLGKSHLSIALGYAACLQGCSVRFATAIDIVNGLAAAQAANALKKELRKYSRPQLLVIDELGYLPIDRLGADLLFQVISQRYERGSIVLNSNKAYKHWPEIFHNDSVLATAVLDRLLHHAETVTITGKSYRMKDQRPEL

SEQ ID NO: 733 - protein, 269 aa, synthetic construct
MTAKHTAPASHDLDTFHLHLDYLKLPFIREHYAELARDAAEQHTDHIDFLTRLIEGEAHWRQDRSVERRIRLARFPVRKTLEQFRWSWPKKINRLQVQNLFRLKFIDEAANVIFIGGVGLGKSHLATALGLAACQQQHSVLFASAIDAVNTLAAAQALGRLKQELRRYVRPRVLILDELGYLPIDKNGADLLFQIISQRYERGSTVITTNRVYKKWPEIFNNDSTLTAAVLDRLLHHAETVTIEGKSFRMKDQIEEQSESATATPATTA

SEQ ID NO: 734 - protein, 251 aa, synthetic construct
MTDEKMPPENLDQNLKYLKLSFMKDQYQHLAAQASKKHWPHVSYLEKLADGEAALRRDRSMQRRIRMARFPVIKTLDQFDWTWPKKINRLQVQNIFRMQLIKDKSNVIFLGGVGLGKTHLGSALGYVACLKGQTVLFATAVDVINSLAAAQKAGRMKQEMKKYTRPALLILDELGFLPIDQRGSDLLFQVISGRYEQGALVITTNKAFKDWPEIFNNDSTLTSAVLDRLLHHAETVLIEGKSYRMKDQIES

SEQ ID NO: 735 - protein, 250 aa, synthetic construct
MKTKHDLATLDSRLDALRLPFLKEHCQPLATTAAKNSIAHLDYLAQLIEGEAALHADRAIARRIRAARFPVIKTLDTFRWDWPKKINRLQIQDLFRLQFVHDKANVIFLGLVGLGKTHLATALGYAACQQGMSVLFANAIDVINTLSAAHTKGTLKSELRKYLAPSLLVLDEIGYLPIDQRGADLLFQVISARYERGPIVITTNKAFKQWTSIFNGDATITSAVLDRLLHHAETVVIEGASFRMKDRIET

SEQ ID NO: 736 - protein, 66 aa, synthetic construct
MNDKKEPQSLLDQHLRYLKLSFMQDHYQNLAAQAAKIHWSHVDYLEKLADGEAAMRRDRSIERRIR

SEQ ID NO: 737 - protein, 64 aa, synthetic construct
MTPSDQTQLDALLQRLHLQYVQSHYLTLASKAAEQQRSHVDYLAQLVEGEFTTREMRSIERRIK

SEQ ID NO: 738 - protein, 243 aa, synthetic construct
MSKRNDVHTTLDRLLDHLAFRFMREQYRSLAEEAARQQWDCLDYLCRLVEGEAAARHDRSVQRRIRLARFPVLKTLDDFDWTWPSKLNRAQVQQLFRLDFLRSRANVIFLGGVGLGKSHLSIALGYAACLQGCSVRFATAIDIVNSLAAAQAANALKKELRKYTRPQLLVIDELGYLPIDRLGADLLFQVISQRYERGSIVLNSNKAYKHWPEIFHNDSVLASAVLDRLLHHAETVTITGKSY

SEQ ID NO: 739 - protein, 248 aa, synthetic construct
MTEDNRRLDEHLKYLKLPFIREHYQRLAAQAAEKQLAHIDYLEKLADGEAAFRRDRSIQRRIQQARFPVIKTLDQFNWSWPKKVNRLQVKNLFRLQFVADKANVIFLGGVGLGKTHLAAALGYQACLEGHAVLFATAIDVINTLTAAQAAGRMKAELKKYTRPAVLILDELGFLPIDKAGADLLFQVISLRYEQGALVITSNRAFKDWPEIFNNDSTLTSAILDRLLHHAETVIVEGKSYRMKDSIEP

SEQ ID NO: 740 - protein, 249 aa, synthetic construct
MDENDTIRLDAQLQQLHLHHIQGHYQPLANQAAEQQLSHVDYLAQLIEGEATLRENRSIKRRIDNARFPVLKTLDTFQWSWPKKINRPQIQNLFRLAFMATQTNVVFIGNVGLGKTHLSIALGHAACLKGYSVLFTTAVDIINSLAAAQSAGQLKRELRRYVRPALLIIDELGFMPIDKHGADLLFQIISQRYERAPMVISTNRAYKHWAQIFNNDSTLTSAILDRVLHHADTVVIEGKSFRMKDEIDP

SEQ ID NO: 741 - protein, 249 aa, synthetic construct
MSENYRRLDEHLRYLKLPFIREHYPTLAAQAAEKQLAHIDYLEKLVDGEAGLRRDRAIQRRIQKARFPVIKTLDQFNWSWPKKLNRLQVKNLFRLQFIPDKANVIFLGGVGLGKSHLAVALGYQACLEGHTVLFATAIDVINTLSAAQAAGRLKTELKKYTRPAVLILDELGFLPIDKAGADQLFQVISQRYEQGALVITSNRAFKDWPEIFNNDSTLTSAILDRLLHHAETVIIEGKSFRMKDSLPPQ

SEQ ID NO: 742 - protein, 256 aa, synthetic construct
MELKHQLTPHLKRLRLSGVLETLDARNRQAIDGQWSYLEFLARLLEDEVERRDQKQLALRIRRATLNTSKTLEDFDFTYNPSLKRQVVLDLATGNYIREHRNALICGPTGVGKTHLAQALAHEACRQGFDVLFANTHKLLRQLHGGRADGSYERRFQAYLRPDLLVLDDFGLKPLQPPAPEDLYDLINERYEKGSILLTSNRAPAEWPELFGDPLLASAGLDRLAHRAEVLVITGSSYRAQGRQRLEQEVHLQPTP

SEQ ID NO: 743 - protein, 258 aa, synthetic construct
MELLHQMTPHLKRLRLSGILDTLEARNQQAIDGRWSYVEFLARLVEDEVERRAQKQLGLRIRRAAINSTKTLETFNFDFNPAINRQQILDLATCSYIRQKRNVLICGPTGVGKTHLAQALAHEACRRGYRVVFANTYRMLQCINGGRADDKLERRLQTYLRPDLLVLDDFGLKQLRPPAPEDLYDVINGRYEAGSILVTSNRALEEWPDLFADPLLASAGLDRLTHRADVILITGASFRAQRPRHAEREAPIVTSYLP

SEQ ID NO: 744 - protein, 207 aa, synthetic construct
  VARIANT 191: note = Any naturally occurring amino acid
  VARIANT 192: note = Any naturally occurring amino acid
  VARIANT 193: note = Any naturally occurring amino acid
  VARIANT 194: note = Any naturally occurring amino acid
  VARIANT 195: note = Any naturally occurring amino acid
  VARIANT 196: note = Any naturally occurring amino acid
  VARIANT 197: note = Any naturally occurring amino acid
  VARIANT 198: note = Any naturally occurring amino acid
  VARIANT 199: note = Any naturally occurring amino acid
  VARIANT 200: note = Any naturally occurring amino acid
  VARIANT 201: note = Any naturally occurring amino acid
  VARIANT 202: note = Any naturally occurring amino acid
MMTHPLLPKLRQLRLSGMLNTLDLRAEQAQQQNLSPVEFFALLLDDELERRNQQNLERRLAQSGCNPQKTLAAFDFSAAAGINRTYVIDPATCAFIARHENVLICGPTGVGKTHIANAIGFEALRRDMRVISKSMIRLLTDLNTARANGTHQRQLATILNCDLLILDDFGLQSISPNMAQDLYEIICERYXXXXXXXXXXXXGQRCA

SEQ ID NO: 745 - protein, 251 aa, synthetic construct
MLTHPLQPKLRQLKLSGMLHTLELRAVQAVERQLGPVEFLALLLDDELERRAQQRLARRLAYSGCDSAKTLAQFDFSSAPGVNRTLIQDLATCAFIPRHENILLCGPTGVGKSHLANALAIEALKRDFRVVSRPTHRLLSELHAARANGAHARFLARILNCDLLVLDDFGLQALSAQAVQDLYEIITERYEHGSLIITSNRAFEEWAEVFNNDLLASAALDRLTHHAHTLIIRGDSYRQRSRRKEPASPPL

SEQ ID NO: 746 - protein, 248 aa, synthetic construct
MELTHQLTPRLRTLRRSGILGTLAGRTRQAVEARTSFVEFLPLLLQDELERRAFAPDKTLEGFTFRVTPTLNTAQVFALVPCQFVARHETVLVYGPTGVGKSHLAQALAPEACRRGFEVLFVSTTKRLTHLAGGRVDGTLAHRLAKYLRPALLVLDDFGLKPLRAPGPEDLYDIIHERYERASILLTSNRDRSEWADLFGEPLLASAALDRLTHRAHFVEITGASYRAEQTMQQLAAKRRINPAGKQD

SEQ ID NO: 747 - protein, 259 aa, synthetic construct
MMTHPLLPKLRQLRLSGMLATLDLRATQAVERQLAPLEFLALLLDDELERRNQGRLARRLAQSGCDGQKDLAHFDFAAAPGVNRPLIQDLSTCTFIARHENILLCGPTGVGKSHLANGLGLEALKREFRVFSYSVPHLLKNLHAAQASGGHTRLWSKILKADLLILDDLGLYPLSPQAARDLYEIINERYERASLIVTSNRAFEEWAEVFNNDLLASAALDRLPHHTHTLTIRGSSYRQRQRRKEEHGATPAWPAASES

SEQ ID NO: 748 - protein, 255 aa, synthetic construct
VELKHQLTPYLKRLRLSGILGTLEARNRQAIEGKWTYIEFLSRLLEDEVERRSQKQLKLRVRRAAINTTKTLETFDFQFNPAINRQQILALAACDYIRQHRNVLICGPAGVGKSHLAQALGQEACRQEFNVLFINTNKMLQHLNGGRADETWERRMNTYLRPDLLVLDDFGLKPLQPPSPEDLYDVINERYERASIMLTSNRAPSEWPKMFCDPLLASAGLDRLLHRAEVVIIRGNSFRAQGRRWLEQEVLSGQE

SEQ ID NO: 749 - protein, 253 aa, synthetic construct
MTHQLSPFLKRLRLSGILETLEVRNQQAIAGQWTYIEFLTRLLEDEVERRSQKQLARRIRRAAINTTKTLEGFDFTFNPTLNRQQILDLAACTYIGQKRNVLLCGPTGVGKTHLAQALTHEACRRGYTALFVNTYRMLQHINGGRADDTLERRLQTYLRPDLLVLDDFGLKALHPPAPEDFYDIINERYERGSILLTSNRPPEEWPDLFGDPLLASAGLDRLTHNAAVVVITGASFRAHGSRPKEEAPIEQHG

SEQ ID NO: 750 - protein, 37 aa, synthetic construct
MELSHHLSPKLKQLRLSGMLATLAARERQAIDGQWTY

SEQ ID NO: 751 - protein, 259 aa, synthetic construct
MMMEMTHQLIPYLKRLRLSGILDTLPARNQQAIDGKWSYIAFLARLLEDEVERRAQKQLALRIKRAAINTTKTLEGFDFAFNPTINRQQVLDLAACTYIRQKRNLLICGPTGVGKSHLAQALTHEACRQGLTALFVNTYRMLQHINGGRADGTLPKRFQTYLRPDLLVLDDFGLKPLHPPAPEDLYDIINERYERGSILLTSNRALEEWPDLFGEPLLASAGLDRLTHNAHVVIITGTSFRAHGLERAGKEGLIESTAN

SEQ ID NO: 752 - protein, 100 aa, synthetic construct
VDGDGDLDALVGNDDWQCNWAADEVWLNDGSGTFSDSGRSLSWGQTLAMALGDVDGDGDLDAFVVHTCGWRDEVWLNGGLGVFSNSEQSLGDFSSEGVAL

SEQ ID NO: 753 - protein, 253 aa, synthetic construct
MISTHPLLPKLKQLKLSGMLGTLDLRAEQATQEQLSPLEFFALLLDDELERREQNRMAYRLATSGCNPAKTLSHFDFSAAPGVNRSFITDLATCAFIQRHENILFCGPTGVGKTHLANALGVEALKRNFRVVSKPTFRLLTDLNASRANGSYNRQMTTLLRADLLILDDFGLQPLSPTAIQDLYEIICERYESGSILVTSNRAFEEWADVFGNDLLSSAALDRLTHHAHSLIIQGESYRQLSRRKEALLKSKS

SEQ ID NO: 754 - protein, 256 aa, synthetic construct
MELRHQLIPQLKRLRLSGILETLEARDRQAQVEQWSYLEFLERLVEDEVGRRDQKQLALRIRRATLNTNKTLEDFDFAFNPSIKRQVVLGLTAGTYIRDHRNVLICGPTGVGKTHLAQALAHEACRQGFDVLFANTHKLLRHLHGGRADGSYERRFRACLRPDLLVLDDFGLKPLQPPAPEDLYDLINERYERGSILLTSNRAPAEWPDLFGDPLLASAGLDRLAHRAEVLLITGSSYRAQGRQRLEQEVPREPTG

SEQ ID NO: 755 - protein, 116 aa, synthetic construct
MLSHPLLPKLRQLKLSGMAHTLDTRAAQATAEQLSPTEFLTLLLDDELERRTGQRLARHIKQSGCDVRKTLAHFDFSAAPDIDRGFISDLATGTFIARHENILLSGPTGVGKTQPD

SEQ ID NO: 756 - protein, 252 aa, synthetic construct
MELTHQLTPYLTKLRLSGILQTLEARNRQAVDGHWSYVEFLARLLEDEVERRAQKQLTLRLRRAAVNSTKTLETFDFNFNPAINRQHVLQLASCDFIRQKHNLLICGPTGTGKTHLAQAIVHEAARQGFDAVFTTTHKMLQHINGGRADGTWERRLQTYLRPALLVLDDFGLKTLPAPGPSDLYDVIDGRYEQGSIILTSNRAPTEWPDVFVDPLLASAGLDRLGDHAEVLVITGASYRAQARLKPGSAGAT

SEQ ID NO: 757 - protein, 254 aa, synthetic construct
MDLTHQLTPHLTRLRLSGILETLDIRNQQAINQKWSYMEFLSRLLEDEVQRRDQKQLALRIRRSTINSTKTLETFDFSFNPTINRQQILDLAGCLYIQQKRNVIICGPTGVGKSHLAQALGHEACRRGYKVLFTSTYYMLSHLNAGRADDTYQRRLNSYLKPDLLIIDDFGLKPLRPPGPEDLYEVISRRYEQGSILLTSNRSPAEWYDLFNDPLLASAALDRLLHGAHAIIITGDSFRTQGRHWSGKKEVAMP

SEQ ID NO: 758 - protein, 259 aa, synthetic construct
MLTHPLLPKLRQLKLSGMLLTLDTRAAQATERQLSPTEFLALLLDDELERRNQQSLARHLKLSGCDELKTLAHFDFTAAPGLNRGFIQDLTSCAFIKRHENLLLTGPTGVGKSHLANGLAIEALKQGLRVLIRNTQRLLTDLHAARADGRYARLLTKLLTVDVLVLDDFGLQPLPAQAAQDLYDLIAERYERRSFIITSNRAFEEWAEVFGNDLLASAALDRLTHHCHPLVIRGESYRQRSRRKEVSGDPSASPADAEL

SEQ ID NO: 759 - protein, 258 aa, synthetic construct
MELMHQMTPHLKRLRLSGILETLEVRNQQAIDGRWTYVEFLARLVEDEVERRAQKQLGLRIRRAAINGAKTLETFNFDFNPTINRQQILDLATCTYIRQKRNALICGPTGVGKTHLAQALAHEACRRGYSVLFVNTYRMLQHINGGRADDNLERRLQTYLRPELLVLDDFGLKPLRSPSPEDLYDVINGRYEQGSILLTSNRALEEWPGLFGDPLLASAGLDRLTHRADVVLITGSSYRAQRPRRAEQEVPVDTSFTS

SEQ ID NO: 760 - protein, 207 aa, synthetic construct
MDLQHQLTPRLKRLRLSGVLETLDVRNQQAIAEQWSYVEFLSRLAEDEVERRDHKQLALRLRRATVNTGKTLESFDFAFNPSINRQQVLDLATSLYVQQKRNVLICGPTGVGKSHLAQALGHEACRRGYDVLFTSAHKMLLHLNGGRAYGTYARRLTSYPICSSSTTFRWASIPATGGFSLITSGSMPSRATRPSSPPRTSSRTWSG

SEQ ID NO: 761 - protein, 256 aa, synthetic construct; identical to SEQ ID NO: 754

SEQ ID NO: 762 - protein, 112 aa, synthetic construct
MAQQRQHPDNAEKQRAYRARQADARRAELQARGLPPTAPIPTLPSRAGYPRAGVHALLAQARLSLETARDEMQAYHDDRSEAWQQGERAAALQDHLDALAQLLDDLDALPPS

SEQ ID NO: 763 - protein, 106 aa, synthetic construct
MPQDRKYASSAGRQAAYRKRCERARRIEMAAKGLPALPAISTMAGWPRWNASIEAARELVERTVDEMQEYFDERTEKWQEGDKGGECQEKIDSTQILLDAFSELTF

SEQ ID NO: 764 - protein, 253 aa, synthetic construct
MEMTHQLIPFLRRLRLSGILGTLEVRNQQAIAGQWTYVEFLARLLEDEVERRAQKQLALRIRRAAINTTKTLEGFDFAFNPMVNRQQVLDLATCSYIRRKRNVLICGPTGVGKTHLAQALAHEACRSGYSALFVNTYKMLQNINGGRADGTLERRFQTYLRPDLLVLDDFGLKLLSAPGPEDLYDIINERYERGSILLTSNRAPEEWPDLFGEPLLAAAGLDRLTHQAQVLVVTGTSFRAHRSKEVLPTESAA

SEQ ID NO: 765 - protein, 252 aa, synthetic construct
MSTHPLLPKLRQLKLSGMLQTLDLRAAQATERQLNPVEFLALLLDDELERRSQQHLVYSLALSGCDSLKSLAQFDFLAAPGINRTLIQDLATCAFIPRHENILLCGPTGVGKSHLANAIAIEALKRDFRVLSKPTHHLLNDLQAARASGAHPRLLARILSCDLLVLDDFGLQTLSPQAVQDLYEIITERYERGSVIITSNRAFDEWAEVFNNDLLASAALDRLTHHTHTLTIRGDSFRQRNRKKEALPSTSS

SEQ ID NO: 766 - protein, 249 aa, synthetic construct
MDLRHQLTPHLTKLRLSGMLQTLENRNRQAIDGQWSYIDFLARLLEDEVERRAQKQLLLRLRRASVNSTKTLESFDFAFNPAISRQQVLQLTSCDFVRQHRNLLICGPTGTGKTHLAQAVIHEAARQGFDAVFTTTHKLLQHLNGGRADGTWERRLQTYLRPDLLVLDDFGLKPLQSPAPSDLYDVIDGRYEKGSILLTSNRAPSEWPDIFLDPLLASAGLDRLGDKAEVLIITGASYRAQGRLRPVTA

SEQ ID NO: 767 - protein, 261 aa, synthetic construct
MMSHPLSPKLRQLKLSGILNTLDMRVSQAVDQQLAPLEFLALLLDDELERRSQQHHVLMLSLSGCDNNKTLAHFDFSAAPGINRTLIHDLASCVFIQRHENLLMCGPSGVGKSHLANAIAIEALKHNFRVLTKPTHRLLYDLQISRSNGSYPRLLARILAYDLLLLDDFGLQSISSQAAQDLYEIITERYEYGSLIITSNRAFDEWGEIFANDLLASAALDRLTHHAHTLIIRGDSFRQSCRRKEIASNNLTFEAPIKPES

SEQ ID NO: 768 - protein, 259 aa, synthetic construct
MMTHPLLPKLRQLRLSGMLETLDLRATQAVERQLAPVEFLALLLDDELERRNQSRLARRLAQSGCDGQKDLAHFDFAAAPGVNRTLIQDMSTCTFITRHENILLCGPTGVGKSHLANGLGMEALKREFRVLSYSVHHLLKNLHATQASGGHTRLWNKILKADLLILDDFGLYPLTPQAAQNMYEIISERYERASIIVTSNRAFEEWAEVFNNDLLASAALDRLTHHTHTLTIRGSSYRQRQRRKEEHGTAPALPAESES

SEQ ID NO: 769 - protein, 76 aa, synthetic construct
MLATLAARERQAIDGQWPYVEFLERLLEDEVERRAQKQLALRVRRAALTSTKTLDSFDWTFNPTVNRQQVLQLASG

SEQ ID NO: 770 - protein, 254 aa, synthetic construct
MEMTHQMVPFLKRLRLSGILQTLDVRNQQAIEEQWTYIEFLARLLEDEVERRAQKQLALRIRRASINTTKTLEGFDFAFNPHINRQQILDLATCSYIRQKRNVLICGPTGVGKTHLAQALAHEACRRGHTALFINTYKMLQRINGGRADGTLERRFQAFLKPDLLVLDDFGLKPLVPPGPEDLYDIINERYERGSILLTSNRAPEEWPDLFGEPLLAAAGLDRLTHQAQIVVITGTSFRAHGPRKEVTIEPMPS

SEQ ID NO: 771 - protein, 255 aa, synthetic construct
MSTTHQLAPDLKRLRLSGILDTLEVRNQQAITEQWSYGEFLTRLVQDEVGRRSQKQLDLCLRRGNVATTKTLETFDFGFNPTINRAQVFDLATCAYLRQHRNVIICGQTGVGKTHLAHALAHEAARQGFDVLCVNADKLLRHLAAGRADASVDKRLQTYLRPDLLVIDDFGLKPLPSTGPADIYDVINERYEKASIMLTSNRAPTEWPEVLGDPLLASAGLDRLGHRATVLTITGRSYRLAQRPTTEEEGPITSR

SEQ ID NO: 772 - protein, 248 aa, synthetic construct
MVPFLKRLRLSGVLQTLDVRNQQAIDEQWTYIEFLARLLEDEVERRAQKQLALRIRRASINTTKTLEGFDFAFNPHINRQQILDLATCTYIRQKRNVLLCGPTGVGKTHLAQALTHEACRRGYKALFINTYKMLQRINGGRADGTLERRFQAFLKPDLLVLDDFGLKPLVPPGPEDLYDIINERYERGSILLTSNRAPEEWPDLFGEPLLAAAGLDRLTHQAQVVVITGTSFRAHGPKKEVAIESTPS

SEQ ID NO: 773 - protein, 253 aa, synthetic construct
MISTHPLLPKLKQLKLSGMLNTLELRAEQASQEQLSPLEFFALLLDDELERREQNRMAYRLGTSGCNPSKTLSQFDFSAAVGVNRYFITDLAGCSFIQRHENVLFCGPTGVGKTHLANALGIEALKRNYRVISKTTYHLLNDLNASRANGSYNRIIASILRCDLLILDDFGLQTLSPVSIQDLYEIICERYEMGSILITSNRAFEEWAEIFNNDLLSSAALDRLTHHAHSLIIQGESYRQLSRRKEAIVSAKS

SEQ ID NO: 774 - protein, 265 aa, synthetic construct
MSVSQQLAPALKQLRLSGILETLEVRNQQAIGEQWTYLEFLTRLAQDEVERRAHKQLDLRVRRSGIAAAKTLETFDFTFNPTISRQQLYDLATCTFVRERRNVLICGQTGVGKSHLAQALAHEAARQGCDILFTSAHQMLQHLQAGRADGSAERRLASYLKPQLLVLDDFGLKPLPPSGPVDLYDVVDGRYERGSIVVTSNRAPDEWPELFGDPLLASAALDRLIHRAAVVLISGRSYRLASQGTSPSASREGKEDTHTPAMATA

SEQ ID NO: 775 - protein, 256 aa, synthetic construct
MEMTHQLIPFLKRLRLSGILETLDVRNQQAIEGQWTYVEFMARLLEDEVERRAQKQLRLRIRRAAINTTKTLEGFDFNFNPSINRQQVLDLSTCTWIRQKRNALICGPTGVGKTHLAQALTHEACRRDYTALFINTYKMLQHINGGRADGTLERRFQTYLRPDLLVLDDFGLKPLHPPAPEDLYDVINESYERGSIMLTSNRAPEEWPDLFGSPLLASAGLDRLTHRAHMIVITGASFRSHGRKGPGKEVSIEPTP

SEQ ID NO: 776 - protein, 256 aa, synthetic construct
MMSHALLPKLRQLKLSGMGLTLELRATQARDQGLGPIEFLALLLDDELERRSQQRLTRRLAQSGCNAQKTLAHFDFAAAPEVNRSLIHDLATCAYLPRHENILFCGPTGVGKSHLANALGIEALKRGFRVFSRSTHRLLADLQAARANGTHHRLLARLLGVDLFILDDFGLQPLSPQGVQDLYELISERYEHGSIFITSNRAFEEWPPLFSNDLLASAALDRLTHHAHLLIIRGQSYRQTSRRKEALTTASASCEA

SEQ ID NO: 777 - protein, 263 aa, synthetic construct
MLTHPLLPKLRQLKLSAMALTLEVRAAQATQRQLSPVEFLALLLDDEIERRAQLRLTRRLAQSGCQAEKTLAHFDFSAAPGVNRTLIQELASGQFIARHENILLCGPSGVGKSHLANALACEALKRDCRVLARPTHRLLNELHAARANGSYARHLARILNVDLLVLDDFGLQPISASAAQDLYEIICERYERGSIIVTSNRSFDEWSEVFGNDLLASAGLDRLTHHAHTLIIRGQSYRQRSRRKEHDDGESLSPATAPLNPAS

SEQ ID NO: 778 - protein, 258 aa, synthetic construct
MSLHQLSAPLKQLRLSGILATLDVRNQQAIAEQWTYVEFLSRLVHDEVERRSQKQLDARIRRGNLQTTKTLTTFDFSFNPTISRPQVYDLASGEYLRAHRNVLICGQTGVGKSHLAQALAHEAARQGADVVFVTAHHLLSHIHGGRADGSYERRLASYVRADLLVIDDFGLKPFPPSGSVDFYDVIHERYERASTVLTSNRAPDEWQELFDNPLLANAALDRLVHRATILTISGRSYRLTDRPEGKEGLKTTTNPATP

SEQ ID NO: 779 - protein, 279 aa, synthetic construct
MSLPSTSAPGVAPGLTHPLLPKLRALKLSGMLLTLETRAAQAAQSQLAPTEFLALLLDDELARRDDQRFHRQVRAAGVDPAKSLAHFDFAAVPALNRTLVLDLATGSFVTHAQNVLFCGPTGTGKSHLANALAVEVLKRGHTALVRPAHRLLADLHAARADGSFARRFARLCTLDLVVLDDFGLRPLTAQAAEDLYDLIRERYERKPLVVTSNRAFDEWPEAFGNGLLASAALDRLTHHCHTLVIRGKSYRQRARPATVPPPSASDPSELTPPHAEDGR

SEQ ID NO: 780 - protein, 273 aa, synthetic construct
MLSHPLLPKLRQLKLGGMALTLDSRASQASERQLSPLEFLALLLDDELERRSQQRLAQHLKLSGCDPAKTLAHFDFAAAPGINRAFIQDLASCTFIQRHENLLLTGPSGVGKSHLANGLAIEALKRDLRVLARGTQRLLLDLHAARANGSHPRLLAKVLSVDLLILDDFGLQPLPAQAAQDLYEIIRERYEHGSLIITSNRAFEEWTEVFGNDLLASAALDRLTHHCHTLVIRGQSYRQRHRQPPLAPDLSAAPVATLLEPQLALEANERNER

SEQ ID NO: 781 - protein, 255 aa, synthetic construct
MELMHQLQPYLKQLRLSGILETLQARNQQAVDGQWTYIEFLSRLMEDEVERRAQKQLALRLRRAAVNTTKTLENFDFSFNPHLNRQRILQLAGCDFIRQKRNLLICGPTGTGKTHLSQALTHAAARLGFSALFVNTHKMLQHLNGGRADGSWERRLQTYLRPDLLVLDDFGLKPLSSPAPEDLYDVINERYENGSIMLTSNRSPSEWPDLFGDPLLASAGLDRLAHAAEVLVMEGSSYRAPGRQRLEEEVQIGLT

SEQ ID NO: 782 - protein, 253 aa, synthetic construct
MISTHPLLPKLKQLKLSGMLGTLELRAEQATQETLSPLEFFALLLDDELERREQNRMTYRLATSGCNPAKTLSHFDFSSAPGVNRSFLTDLATCAFIQRHENVLFCGPTGVGKTHLANALGVEALKRNFRVISKPVFRLLAELNASRANGSYNRLLTNLLRADLLILDDFGLQPLSPTAIQDLYELICERYENGSILVTSNRAFEEWAEVFGNDLLSSAALDRLTHHAHTQTIQGESYRQLSRRKEALLKAKS

SEQ ID NO: 783 - protein, 261 aa, synthetic construct
MMLHPLVPKLRQLRMSGMAQTLEVRASEAVQQNLSPVEFLALLLDDELERRGQQRLARRLAQSGCDDQKTFARFDFAAAPGINRTFIQDLATCTFIARHENLLICGPTGVGKSHVANALAIEALKRDLHVLFRSTQRLLGDLHAARANGTHARLWARVLNVDLLVLDDFGLQALSPQAAQDLYDLISERYEHGSLVVTSNRAFEEWAAVFGNDLLASAALDRLTHHAHTLVIRGESYRQHSRRKELGNLSAVLPAAVASER

SEQ ID NO: 784 - protein, 251 aa, synthetic construct
MIAHPLLPKLRLLKLSGMLLTLDLRAAQAAERQLSATEFLALLLDDELERRAQQHLVHSLAISGCDSLKTISTFDFLAAPGINRTLIQDLAACAFIPRHENILLCGPSGVGKSHLANALAIEALKRDYRVLSRPAHRLLSDLQAARATGAHTRLMTRILTCNLLVLDDFGLQPLSAQAVQDLYEIITERYERGSLIITSNRAFTEWAEVFNNDLLASAALDRLTHHTHTLTIRGDSFRQRDRKKEAPPIPD

SEQ ID NO: 785 - protein, 253 aa, synthetic construct
MELMHQLTPKLKQLRLSGVLETLDVRHRQAIDSQWTHVEFLARLLEDEVERRAQKQLALRTRRATVNTAKTLENYDFAFNPTVKRAQVLQLASCDYIRQKQNVLVCGPTGVGKSHLAQALGHEALRQGFDVLFVNAHKMLQHLYGGRADGSLDKRLQVYLRPDLLILDDFGLKPLTAPAPEDLYDVINERYERGSIMLTSNRAPAEWPDLFGNPLLASAGLDRLTHHAEMIVITGQSFRSQGRVRLEQEVLSA

SEQ ID NO: 786 - protein, 259 aa, synthetic construct
MLTHPLLPKLRQLKLSGMLTTLDTRAAQALERQLSPTEFLALLLDDELERRNQQSLARRLKLSGCEAHKTLTRFDFAAAPGVNRPFIQDLASCAFINRHENLLLTGPTGVGKSHLANGLAIEALKRDLRVFSRNTQRLLNDLHAARASGSDTRFLTKLLTVDVLVLDDFGLQPLTPQAAQDLYDIIAHRYETGSLIITSNRAFEEWTEVFGNDLLASAALDRLTHHCHTLVIRGQSYRQLSRRKEVPSDPPASPADPVG

SEQ ID NO: 787 - protein, 258 aa, synthetic construct
MELRQHLAPKLKLLRLSGILDTLDVRLRQAIDDKWSYDDFLERLLEDEVERRQQKQLALRVRRADLGSDKTLETFDFTFNPSVNRQQLYDLATGNYIREHRNVLLCGPTGVGKSHLAQALAHEACRRGFDVIFTNAHKMLRHLSAARADNSYEKRLALYVRPDLLVIDDFGLKPLTAASSEDLYDIIDERYERKGAILLTSNRAPSEWATWFGNPLLASAGLDRLAHNAHVIVITGPSYRARGRRQLEEVPLTSTIPN

SEQ ID NO: 788 - protein, 255 aa, synthetic construct
MMELKNQLVPKLKSLRLSGILETLEVRNQQAIEEKCTYVEFLQKLLEDEVERRGQKQLSLRLRRSNLDPSKTLESFDFTFNPNLNRQQFYDLATCGFVERAESVFLCGPSGVGKSHVAQGLGHEAARRGYDVVFVRTSAMLQNLHAGRADGTYERRLAALHRPEVLILDDFGLKAMRPPAMEDFYEVIEGRYGKGAFIITTNRAFSEWGELFDNPVLASAALDRLAHGATQIVMTGESYRAKGPRSRPALVGASR

SEQ ID NO: 789 - protein, 192 aa, synthetic construct
MSTKPWRIFDFAAAPDVDRGFISDLATGAFIARHENILFSGPTGTGKTHLAHALAFEALKMEKRVIFRNTAKLLAELNTARAVGTYPRLLRKTLTADLLVLDDFGLQPLTAQGAQDLYEIIAERYEHGSLIVTSNRAFTEWGAVFGNDLLASAALDRLTHHSHTLTIRGESYRQRQRRKEVTGVNSASPATP

SEQ ID NO: 790 - protein, 257 aa, synthetic construct
MLTHPLLPKLRQLKLGGMAHTLDTRAAQATADRLSPTEFLALLLDDELERRTGQRLARHIKQSGCDVNKTLAHFDFAAAPDVDRGFISDLATGAFIARHENILFSGPTGTGKTHLAHALAFEALKMEKRVIFRNTAKLLAELNTARAVGTYPRLLRKTLTADLLVLDDFGLQPLTAQGAQDLYEIIAERYEHGSLIVTSNRAFTEWGAVFGNDLLASAALDRLTHHSHTLTIRGESYRQRQRRKEVTGVNSASPATP

SEQ ID NO: 791 - protein, 251 aa, synthetic construct; identical to SEQ ID NO: 745

SEQ ID NO: 792 - protein, 259 aa, synthetic construct
MLTHPLLPKLRQLKLSGMLLTLESRAAQAIERQLGPVEFLALLLDDELERRNHQSLARRFSLSGCDDQKTLARFDFSAAPGINRAFFQDLASCAFIQRHENLLLTGPSGVGKTHLAKALVIEALKQNLRVLSRGTHRLLAELHAARASGSYPRFLAKLLGLDLLVLDDFGLQPLSVQAAQDLYDLMRDRYERGSLIITSNRAFEEWPEVFGNDLLASAALDRLTHHCHTLVIRGQSYRQRSRRKEVINEAVASPIDPVA

SEQ ID NO: 793 - protein, 261 aa, synthetic construct
MMSHPLSPKLRQLRLSGILDTLDLRVAQTVEQHLAPLEFLALLLDDELERRRQRQQILLLSLSGCDNNKTLVHFDFSAAPGINRTLIQDLASCLFIQRHENLLLCGPSGVGKSHLANAIAIEALKRNYKVVAKPTHRLLYDLQIARSNGSYPRMLTRILSCDLLLLDDFGLQSISAQAAQDLYEIITERYEKGSLIITSNRAFEEWGEVFANDLLASAALDRLTHHSHTLVIRGESFRQRSRRKEIDPINSSIDDPVKPEI

SEQ ID NO: 794 - protein, 72 aa, synthetic construct
MIAHPLLPKLRLLKLSGMLLTLDLRAAQATERQLTSTEFLALLLDDELERRGQQHLVHSLAMSGCDSLKTMT

SEQ ID NO: 795 - protein, 254 aa, synthetic construct
MLSHPLLPKLRQLKLSGMALTLDTRCAQAAATNLTALEFLALLLDDEIERRQQKRLKRRLGESGLDPGKSLAQFDFAALPQLNRGLILELATCAYLVKGQNLLLCGPTGVGKSHLVNALGLEALKRNYSVYQRSLQRLLSELNAARADGSFSRRFNKLCDVDLLILDDFGLRPLTAQGAEDMYELICRRYERRPLFITTNRSLNELPDVFGDGLLASAALDRFTHHCQTVIIRAASYRQKGHRKEEPDMLESSS

SEQ ID NO: 796 - protein, 258 aa, synthetic construct; identical to SEQ ID NO: 759

SEQ ID NO: 797 - protein, 129 aa, synthetic construct
MELMHQMTPHLKRLRLSGVLETLESRNQQAIDGRWTYVEFLARLVEDEVERRAQKQLGLRIRRAGVSTAKTLETFNFDFNPTINRQQVLNLASCTYIRQKRNALICGPTGVGKTHLAQALAHEACRRGY

SEQ ID NO: 798 - protein, 173 aa, synthetic construct
MTHQLSPFLKRLRLSGILETLEVRNQQAIAGQWTYIEFLTRLLEDEVERRSQKQLARRIRRAAINTTKTLEGFDFTFNPPLNRQQILDLAACTYIGQKRNVLLCGPTGVGKTHLAQALTHEACRRGYTALFVNTYRMLQHINGGRADDTLERRLQTYLRPDLLVLDDFGLKAL

SEQ ID NO: 799 - protein, 252 aa, synthetic construct
MLAHPLLPKLRLLRLSGMVHTLDLRASQATEQQLSPIEFLALLLDDELDRRQQTRMARRLAQSFCDATKNLARFDFAAAPGVNRTAIQELATCGFIARHENVLLCGPTGVGKSHLANALTYEALKRDLRVLMRNTQQLLRSLNASRANGGYQRLLARVLGVDLLVLDDFGLQPINAQGAQDLYDIINERYERGSIMLTSNRAFEEWAEPFANDLLASAALDRLTHHAHIMRLRGKSYRQRHRLEEVPPADPA

SEQ ID NO: 800 - protein, 259 aa, synthetic construct
MLTHPLLPKLRQLRLSGMVETLDLRAAQSIERQLSPTEFLALLLDDELERRNQNRLARCLAQSGCDSHKTLVHFDFAATPGVNRILVQDLATCTFITRHENILLCGPTGVGKSHLANGLGIEALKREFRVLSYPLHHLLKNLHAAHASGGHARLMSKILKTDLLILDDFGLYPLTAQAAQNLYEIIAERYERASIIITSNRAFEEWAEVFDTDLLASAALDRLTHHTHTIIIRGSSYRQRQHRKEDMGATAVLPADDES

SEQ ID NO: 801 - protein, 259 aa, synthetic construct; identical to SEQ ID NO: 800

SEQ ID NO: 802 - protein, 265 aa, synthetic construct
MSGAHQLTPYLKQLRLSGILDTLEVRNQQAITEQWSYLEFLTRLIQDEVERRGQKQLDLRVRRSGISPAKTLESFDFGFNPTINRQQIYDLATCEFVRARRNALICGQTGVGKSHLAQSVAHEAARKGFDVVFTSAQAMLSQIHAGRADGTYERRLAGYLKPHLLVIDDFGLKPLPQPAGPADLFDVIDGRYEKASIVLTSNRSPSEWHDLFGDPLLASAGLDRLAHRAIVVLITGQSYRLAQPPEGADGALFAPPASPRGGNRR

SEQ ID NO: 803 - protein, 256 aa, synthetic construct
MLSHPLLPKLRQLKLSGMLHSLDRRASEAAEAQLSPTEFLALLLDDELERRSQTRFARLMTESGLEPGRTLAQFDFSAVPQLNRTLILELATCAFVAHAESILLVGPTGTGKSHLAHALGYEALKRGHSVYVRSAHRLLADLHASRADGSYSRRFAKLCSVSLLVIDDLGLRPLSPQASEDLYEIIQERYERRPLLLTSNRALHEWPDMFSDTLLASAALDRLTHHCHTIVIAGQSYRQRGRRKEDPAIDPPASAA

SEQ ID NO: 804 - protein, 252 aa, synthetic construct
MSTHPLLPKLRQLKLSGMLQTLDLRAAQATERQLNPVEFLSLLLDDELERRSQQHLVNSLALSGCDSLKSLTQFDFLAAPGINRTLIQDLATCAFIPRHENILLCGPTGVGKSHLANAIAIEALKRDFRVISKPTHHLLNDLQAARASGAHPRLLARILSCDLLVLDDFGLQTLSPQAVQDLYEIITERYERGSVIITSNRAFDEWAEVFNNDLLASAALDRLTHHTHTLTIRGDSFRQRNRKKEALPSTLP

SEQ ID NO: 805 - protein, 259 aa, synthetic construct
MLTHPLLPKLRQLKLSGMLLTLDTRAAQATERHLSPTEFLALLLDDELERRSQQSLARRLKLSGCDALKTLARFDFSAAPGLNRPFIQDLASCAFIQRHENLLLTGPSGVGKSHIANALAIEALKRELRVFCRPTQRLLADLHAARASGADARFLTKLLSVDLLVLDDFGLQPLSPQAAQDLYDLMAHRYEAASLIITSNRAFEEWAEVFGNDLLASAALDRLTHHCHTLVIRGLSYRQLSRRKEASGDPSASPADLVV

SEQ ID NO: 806 - protein, 259 aa, synthetic construct
MLTHPLLPKLRQLKLSGMGLTLDTRAAQALERQLSPTEFLALLLDDELERRSQQSLARRLKLSGCDQLKTLARFDFSTAPGVSRPFIQDLASCTFINRHENLLLTGPTGVGKSHLANALAIEALKRELRVLCRGTQRLLTDLHAARASGSDARFLTKLLTVDLLVLDDFGLQPLSPQAAQDLYHIMAHRYETGSLIITSNRAFEEWPEVFGNDLLASAALDRLTHHCHTLIIRGQSYRQLSRRKEVTGQPSASPAEPIT

SEQ ID NO: 807 - protein, 106 aa, synthetic construct; identical to SEQ ID NO: 763

SEQ ID NO: 808 - protein, 257 aa, synthetic construct
MLAHPLLPKLKALRLSGMADSLEERSELAREQKLTPVEFLALLLDDEIDRRQRKRLARMEASAGFENVKQLSGFDFSAAPTIDRSLVLEMATCSFIERKENWLICGPTGVGKSHLATAMGYEAIKRGYSVSSHATHKLLAELHASRADGSASKLMHKVTTCDLLILDDFGLRPITAQGADDLYEIIHCRYERSSIILTSNRSPAEWPEVFGDSLLASAALDRLTHHARVTVITGESYRQRTRRKEAQPPENAVSQTA

SEQ ID NO: 809 - protein, 263 aa, synthetic construct
VITHALFPKLRQLKLSGIALTLDVRAAQATERQLTPTEFLALLLDDELERRDQRRLARRLDQSGCDNCKSLAHFDFNAAPGVNRTLIQDLATCTFVTRHENVLLCGPTGVGKSHLANALAFEALKRDCRVLSRPVHRLLADLHAARANGSHQRLLAKVLAVDLLVLDDFGLQPLPAQAAQDLYEIITERYERASLIITSNRAFEEWPATFANDLLASAALDRLTHHAHMLIIRGPSYRQRGRPKEVTGSLPALPADNLSIASS

SEQ ID NO: 810 - protein, 261 aa, synthetic construct
MMIHPLLPKLRQLKLGGMVQTLDVRATQATQQQLTPVEFLALLLDDELERRGQQRLAHRLAQSGCDEQKTLARFDFAAAPGINRAFIQDLATCAFITRHENVLVCGPTGVGKSHLANALAIESLKRDQTVVCRNTQRLLTDLNAARANGVYSRLLARVLTVDLLVLDDFGLQPFLPQAAQDLYDIISERYEHGSVIVTSNRAFEEWADVFGNDLLASAALDRLTHHAHSLIIRGESYRQRSRRKEATGDPSIASANLTTQT

SEQ ID NO: 811 - protein, 252 aa, synthetic construct
MSAHPLLPKLRQLKLSGMLQTLDLRAAQSIERQLSPVEFLALLLDDELERRSQQHLVHSLALSGCDNLKTLAQFDFLATPGVNRTLIQDLATCAFIPRHENILLCGPTGVGKSHLANAIAIEALKRDFRVISKPTHRLLNDLHAAYASGAHARLLARLLRCDLLVLDDFGLQALSAQAVQDLYEIITERYERGSLIITSNRAFDEWAEVFNNDLLASAALDRLTHHTHTLTIRGDSFRQRNRKKEALPTLPA

SEQ ID NO: 812 - protein, 260 aa, synthetic construct
MSHPLSPKLRQLRLSGILDTLDLRVAQTVEQHLAPLEFLALLLDDELERRRQRQQILLLSLSGCDNNKTLVHFDFSAAPGINRTLIQDLASCLFIQRHENLLLCGPSGVGKSHLANAIAIEALKRNYKVVAKPTHRLLYDLQIARSNGSYPRMLTRILSCDLLLLDDFGLQSISAQAAQDLYEIITERYEKGSLIITSNRAFEEWGEVFANDLLASAALDRLTHHSHTLVIRGESFRQRSRRKEIDPINSSIDDPVKPEI

SEQ ID NO: 813 - protein, 255 aa, synthetic construct
VEITQHLHPFLKRLRLSGILETLEVRTQQAIAGHWTYDEFLVRLLEDEVERRAQKQLALRIRRAAINTTKTLEGFDFTFNPTLNRQQVLDLAACTYIRQKRNVLLCGPTGVGKTHLAQALTHEACRRGYTALFVNTYRMLQHLHGGRADGTFARRIQTYLRPDLLVLDDFGLKALRPPAPEDFYDLINERYERGSILLTSNRPPEEWPDLFGDPLLASAGLDRLTHNATLVVITGVSFRAHRGQPGEEVPSKPAS

SEQ ID NO: 814 - protein, 251 aa, synthetic construct
MPFVSVADACRRLGIDAKTLRRWLADAQLPMPRHPHDGRKKGVSGEHLHLLARLHHRSLAPLPQEPPAPVDGEGPPLPDALLALPERLSALQAQVAALQQQVTDLTCLLGQHTLKPVSLSAPPKPSRRSKRSPKLAPSATAKTPRKPVHVIPRVEYGEQGHYVVICPKHGLLPLEPDTPEWFAWLAKQSSFRFVGRAGSFSAHHEWRVPRGAWRAHRHIRNHGYTLRLAPTQALTIAVLEQAAATLQAHLL

SEQ ID NO: 815 - protein, 260 aa, synthetic construct
MTVVSVAEAADRLGIDAKTLRRWLEEAQLPLHRHPRDGRKKGLSDEHLQALARLHQRCLAPLSLESPAPAESLGPALPAALLALPEQLDTLQARLAALQQQVVALTHLLQQHEQEPSLSAAEAQPPSTARRSPKPAPSAPRSRPAASATAKPPRKPTHVIPRVAYGSEGRYVVICPKQGLLPLEPDTPEWFAWLGQQSSFRFVGKGGHFTAHHEWRVPRGAWRAHRQIRNHSYTLRLALTQELTLAVLEQAAETLQAHLR

SEQ ID NO: 816 - protein, 259 aa, synthetic construct
MTILSLADGCRQLGIDPKTLRRWLAQAPFTRQPHPQDARLTGLTVEQLRWLAQAHHRHLATLPQEQEGVAPTTPIASPTLPEDLRELLQALRALPAQLVALQEQLADVSQGLSQGTGPSATARSRSGATTRAAGRRRSQGRSQAESLRQQRRPSQAQVLALVEYAGEGRYVVISPRGGLLPFEPETPAWFAWLTTCSSFRFVGKSGRLTAHRELHNVSRAVWRAHRSIRNHTYNVHLGKTEDLTIATLEQAAAALHAHL

SEQ ID NO: 817 - protein, 256 aa, synthetic construct
MTFVSVADASRHLGVDAKTLHRWLAEAQLALQSHPHDGRKKGVSEEHLQVLASQHQRRLASLPEVPPAPVNSEVPPLPAELLALPEQLSSLQAQLSALHQQVADLTLLLLPQAHPKAGAAAPTLPSKTRTRSPEPAPPAPHARPVATTPRTPVHVIPRVEYGEGGHYVVICPKRGVLPFEPDSPEWFAWVAEQESFRFVGKMGHFSAHHEWRIPKGAWRAYRKIRNRNYILRLAPNHELTIAVLEQVALALQAHLT

SEQ ID NO: 818 - protein, 250 aa, synthetic construct
MTFVSVAQASGRLGIDAKTLHRWLAEAQLPLHRHPRDGRKKGLSQEHLQVLARLHQRSLAPLPEGPPLPAALLALPATLGALQAQLAALEQQVADLTHLLQQHACQPVSPPPVQQTKATSHPPKPASSAPRSRLAISATAKTPRQPAHVLPRVEYGSEGHYLVICPKQGRLPFEPDSPEWFVWVAKQSSFRFVGRAGRFSAHHEGRVPTGAWRAHRHIRNHGYSLRLAPSHELTMAVLEQAAQALQAHLT

SEQ ID NO: 819 - protein, 256 aa, synthetic construct
MPFVSLAQAARRLGIDVKTLHRWLADAQLPLHRHPHDGRKKGVSSEHLQALARLHQRSLAPLPQQSPAPEASQEPPLPAALLALPETLCALQAQIAALQQQVADLTRLITQHRPGPAIPLAPTKPPRTAKRPAKPTSPAPRSRRAAKPPSKSAHVIPRVEYGPEGRYVVICPKQGLLPLEPDTPEWFAWLAAQSSFRFVGKLGRFTAHHEWRVPRGAWRAHRHIRNHGYTLRLAPTHDLTMAVLEHTAEALQAHLT

SEQ ID NO: 820 - protein, 260 aa, synthetic construct
MTFLSLAEATRRLGIDAKTLRRWLADAQLPLQSCPHDGRKKGMSGEHLQVLARLHQRSLAPLPQEPPASVVGEPLPLPAVLLTLPETLDALQGQMTALQQQVAALTRLLQQHGQEPATPAAPTQQTRTAKRLSKPAPPAPRSRPAASAAAKPPRKPAHVLPRVEYGSEGHYVVICPKQGLLAFEPDSPSWFRWLATQSSFRFVGKGGRLTAHHEWRVPRGAWRAHRHIRNRSYTLRLAPTHDLSIAVLEQAAAALQAHLT

SEQ ID NO: 821 - protein, 260 aa, synthetic construct
MTFVSLAQAARRLGIDAKTLHRWLADAQLALQSHPHDGRKKGVSSEHLHLLARLHQRSLTPPAEMPPALHLGEVPELSAALLALPEQLCTLQTQIAVLQQQVADLTRLHEQHGPEPAIPLAPSQQSRTAKRPKKPTPPAPRSRPAASAPAKTPPKPTHVLPRVEYGREGRYVVICPKHGLLPLEPDTSAWFAWLAKQSSFRFVGKVGRFSAHHEWRVPRGAWRAHRQIRNHSYTLRLAPTQDLTVAMLEQAAEALQAHLR

SEQ ID NO: 822 - protein, 256 aa, synthetic construct
MIFVSLAQASRRLGIDAKTLHRWLADAQLALQCHPHDGRKKGVSSEQLQLLARQHQRSLAPLPQEPPAPVTSEVPPLPAELLALPEQVSALQTQVAALQQQVADLTRLREQQAHPPGNPAPLAKPSRTSRRSSKPAHPVPRSRPAAKTPRKPIHVIPRVEYGEEGHYVVICPKHGLLPFEPDTPEWFAWLAEQSSFRFVGKSGHFTAHHEWRVPKGAWRAHRQIRNHNSIQRLAPNHELTIAVLEQAALALQAHLT

SEQ ID NO: 823 - protein, 256 aa, synthetic construct
MSFVSVAQATTRLGIDAKTLHRWLAEAQLPLHSCPQDGRKKGVSDEDLQALARRHQRSLTPPPPEPPVPVAGEGPALPTALLALPERLDALQTQIAALQQQVTALTRLITQHRQEPVIPAASTQQAKSASRPSKPASPAPRSRPAAKLPRKPVHVIPRVEYGDEGHYVVICPKHGLLPLEPDTPQWFAWLATQSSFRFVGKAGHFTAHHEWRVPRGAWRAHRHIRNHGYSLRLALTRELTIAVLEQAAAALQAHLP

SEQ ID NO: 824 - protein, 256 aa, synthetic construct
MTFVSVAQATRSLGIDAKTLHRWLADAQLPLPCHPHDGRKKGLSEEHLQALARLHQRRLASSEEEGRAQLPCQIPALPADLLWLPEQLAAMQAQLVTLQQQVTDLTRLLQQHRPEPAIPLAPTKPTSTAKSPAKPTRSRPAASASAKTPPKPVHVIPRVEYGEEGHYVVICPKRGLLPFEPETQEWFAWVAEQDSFRFVGRSGHFTAHHEWRVPKGAWRAHRQIRNHSYTLRLAPNQELTMAVLEQAAEALQAHLT

SEQ ID NO: 825 - protein, 259 aa, synthetic construct
MTLMSLADGCRQLVIDPKTLRRWLAQAPFTLPPHPLDAQRQGLTEQQLRWLAQAHHRSLPTLAQELPQPAPAPSAEAPALPTDLCEVLVALRALPAQLAAMHEQLADLTHHLQQPAATSPMARSRSGATPKATGRRQRSGRGRAESPRQQPRPSPAQVLALVEYAGEGHYVVISPKGGLLPFEPDTPAWFAWLTTCSSFRFVGKLGRLTAHRELHNPSRAVWRAHRNIRNHTYNVRLGKTEQLSIAALEQAAAALHAHL

SEQ ID NO: 826 - protein, 198 aa, synthetic construct
MTLISLTDCCRLLGIDGKTLRHWLAQAQLGVQAHPRDARIKGLSREQVRLLAHTHHRSLAGLLEEPPSTPAPGEPPPLPAALLALPERLRALEAQLSALQQQVTTLTCLLEQASAAPRTQRRAHSAPRPKSRPVASAARKPARQAAPVLPLVESGRDGHYVVICPKQGLLPFEPESPEWFAWLASLSSFRGCRANRAA

SEQ ID NO: 827 - protein, 273 aa, synthetic construct
MTIMSLSQCCRLLALDPKTFRHWLALEALTLQPHPADARIKGLTHDQLLLVAAAHRRTLPELPAELPMPAPTSTPQVLPSLPHEAINLLQALSDLPAQISALHQQLALLTEQMHQYLQAPPISHALDSACSLAEPVLASSLMASPTPAKAAAPFPRPTSPSTKRPRQPAHVLPLVEYGANGDYVVICPQHGLLSLQPDSPAWFAWLQTLSAFRFVGKFGRLTVHRESRRLPRAVWRAHRHIRNRTYNHRLGPTECLTIAVLEQAAATLQSHLK

SEQ ID NO: 828 - protein, 248 aa, synthetic construct
MTFVSVAQGCRRLGVDAKTFRRWLTDAQIPLQSHPGDGRKKGVSSEQLQALACLHQRSLAPPPSEMPPLPAALLALPEQFGALQAQISALQQQVAELTRLLEQHGPEPAIAQAPTQQTRTDKRPAKPTPPAPRSRPATKPPSKPAHVLPRVEYATAGRYVVICPKRGLLSLEPDTPEWFAWLAEQSSFRFVGKVGSFSAHHEWRVPRGAWRAHRHIRNHSYALRLAPTQELTIAVLEQAAQALQAHLT

SEQ ID NO: 829 - protein, 258 aa, synthetic construct
MTVVSLADGCRQLGIDPKTLRRWLATAPFTLQSHPHDVRRKGLTQEQLCWLAQAHHRSLPNLPQEPSQPASVPSAEETLALPDDLLEVLGALRALPAQLAALQEHLAVLTHQFSHLAAPASTARSRAGVTSKAANSRGGGRGRSTSSQPQRSSKAQVLAVVEYAGEGRYVVISPRGGLLRFEPGSPSWFAWLSSCSSFRFVGKLGRLTAHREVERVRQGTWRAHRNIRNHTYNVHLGVTEELTIAALEQAAATLHAHL

SEQ ID NO: 830 - protein, 274 aa, synthetic construct
VEDARLPRPDHPCDGRKQGVSGEHLELLAHLHHRQLNALPKEPPLSVPAVPPSVPAELRALPQTIGIVQAQITALQQHVATLTSLLHQHRPPPPSPPPPVSPPGPATRSPNPPSPALRPRSTSSAPTTTPATPAHVIPRVAYDPNGRSIVICPTRGVLPFAPDTPEWFPWVATPDACRLVGKGGHFSAHQEWRVPKGAWRAHRPLRNHNPILRLAPHQERTVAVLEQAAEALHAHLLEPLAWVGFPPFEAFLRNQKNGASETGFAHHSYKEVPL

SEQ ID NO: 831 - protein, 257 aa, synthetic construct
MTFVSVADASRRLGIDAKTLRRWLADAQLPLHSHPRDGRKKGVSSEHIQVLARLHQRSLAPLPQEPSAPVESLVPPLPAALLALPERLGALQAQVAALRQQVAALTSLLQQHVQQPALPAAPAKPPRTARRPPKPAPPALRARSATSALAKPTHVLPRVEYVRAGHYVVICPKHGLLPLEPDTPAWFAWLATISSFRFVGKLGRLTAHRELQSISRAVWRAHRKIRNHTYNGRLGKTENLSIAVLEQAAATLQAHLT

SEQ ID NO: 832 - protein, 163 aa, synthetic construct
MTFVSVAQATTRLGIDAKTLHRWLAEAHLALHRHPHDGRKKGVSGEHLHLLARLHHRSLAPLPQEPPAPVDGRGPPLLAAPLDDPAAGRGARAAQAVAAWAEQLTPTPEAPNGTSASLDAAARQITAVFVDVGFDPELAATRDRRRIALRACPFRAVAREHPE

SEQ ID NO: 833 - protein, 256 aa, synthetic construct
MPFVSLAQAARRLGIDVKTLHRWLAQAQLPLRSHPHDGRKKGVSSEHLQALARLHQRSLAPLPQQSPAPEASQPPPLPAALLALPETLCALQAQIVALQQQVADLTRLITQHGPGPAIPLAPTKPPRTAKRPAKPTPPAPRSRRAAKPPSKSAHVIPRVEYGPEGRYVVICPKQGLLPLEPDTPEWFAWLAAQSSFRFVGKLGHFTAHHEWRVPRGAWRAHRHIRNHGYTLRLAPTHDLTMAVLEHTAEALQAHLT

SEQ ID NO: 834 - protein, 258 aa, synthetic construct
MTLLSVTDCCRLLAIDAKTLHRWLAQAQLPLQAHPSDARLKGLSRDHLLLVATAHHRSLAALPEKLPAPAPPQLPHEPPPVPQDLLDLLAKLSELPAQVAALQQQMTALTQLIPQAATEPSPGLVLAGEPAVTPAAARSHPAAARAPKQPPKPAHVLALVEYAGEGHYVIICPTHGLLPFEPESPEWFAWLATRSSFRFVGQHGRLTAHREVERVPTGAWRAHRKMRNHTYNLRLGSTQSLTIAVLEQAAAVLQAHLT

SEQ ID NO: 835 - protein, 258 aa, synthetic construct
MTVVSLAQAARRLGIDAKTLHRWLAQAQLPVQPHPSDGRQKGVSSDHLHTLARMHQRTLTSLAAEPFAPRVRTEPEPPALLALSEQLAALQAQVAGLQQQVADLSRFLQPHTAERASPAAPTKPSPTSRRSSPSASPASRSRRAAAAATTPRKPVHVIPRVEWDGQGSYVVICPKKGLLALALDTPEWFDWLRTQSSFRFVGKEGTFSAHHEWRVPRGAWRAHRQIRNHGYHLRLAPTQQLTSAVLEQAAAALQAQLI

SEQ ID NO: 836 - protein, 256 aa, synthetic construct
MTVVSLVQAARRLGIDAKTLHRWLAEAGLAVQSHPTDRRQKGVSSDHLLTLARLHQRTLTSLPAESPALGVSTPSASAALLVLSEQLAALQAQVAGLQQQVADLSRQPHAAERASSVASSKPSPTSKRSSTPASPASRSRRAAAAATTPRKPVHVIPRVEWDGQGSYVVICPKKGRLALALDTPEWFDWLRTQSSFRFVGKEGTFSAHHEWRVPRGAWRAHRQIRNHGYHLRLAPTQQLTSAVLEQTAAALHAQLI

SEQ ID NO: 837 - protein, 254 aa, synthetic construct
MIFVSVAEAARHLGIDAKTVHRWLADAQLPLQSHPHDGRKQGVSREQVHQLARLHQRSLAPLPLEEPPAPHPDELPALPAALLALPEQLSTLQAQISTLQQQVAALTLLLQQQLYPPVSQAPPTKPSKRPPKPTPPAPRSHPAAKALRKPAHVLPRVEYGSDGHYVVICPKRGLLSFEPDTPEWVAWVAEQSSFRFVGKLGRFTAHHEGRIPKGAWRAHRQIRNHSYTLRLAPNHELTSAVLEQTAEALQAHLT

SEQ ID NO: 838 - protein, 260 aa, synthetic construct
MTFVSLAQATHRLGIDVKTLHRWLCDAQLALQCHPDDGRKKGVSSEYLHLLARLHQRSLAPLPEESAASEALAPPELSAVLLAMPEHLAALQAQISTLQHQVADLTRLISQPRPDLALPLTPTKPSIAVKQRAKPTRSASGSRPMASASAKTAPKPVHVIARVEYGKQGRYVVTCPKGGLLPFEPDTPEWFAWVAKQDAFRFVGKSGHFTAHHEWRVPKGAWRAHRHIRNHSYTLRLAPAHELTIAVLEQAAQALQAHLR

SEQ ID NO: 839 - protein, 249 aa, synthetic construct
MTFVSLAEATRRLGIDVKTLHRWLAEAQISLHSHPDDGRKKGVSQEHLQVLARLHQRSLTPLCQVPSVPVASPVPELAAAMLMLPEQLCVLQAQVAALQEQVADIRSLIMQDRSEPAIPVVPTKSSRTRRPAASAPAKAKTPSKPVHVIPRVEYGEEGHYVVICPKGGLLPLRPDTPEWFAWVAKQEAFRFVGKSGYFTAHHEWRVPKGAWRAHRQIRNHSYTQRLAPNHELTIAVLEQAAETLQAHLR

SEQ ID NO: 840 - protein, 252 aa, synthetic construct
MTFVSVAQATRRLGIDAKTLRRWLADAQLALQSHPHDGRKKGVSAEELHLLAHRHQRSLAPLPQEPSAPGADELPALLALPERLDALQTQIAALQQQLTALTRLLQQHCQEPAIPAASTQQAKSASRPSKPASPAPRSRPAAKLPRKPVHVIPRVEYGDEGHYVVICPKQGLLPFEPDTPEWFAWVAEQSSFRFVGQGGTFSAHHWWRVPRGAWRAHRQIRNHTYNLRLAPTQELTIALLEQAAAALQAHLQ

SEQ ID NO: 841 - protein, 252 aa, synthetic construct; identical to SEQ ID NO: 840

SEQ ID NO: 842 - protein, 260 aa, synthetic construct
MTFFSVADACRRLGIDAKTLRRWLTDAQLSLQSHPHDGRKKGVSSEHLRLLAHLHQRSLAPLPPGPSQRVPDALPPLPAALLALPETLCALQTQIAALRASVAELTSLLTSQLQQPARTFASPKPSKVARQPAKPASPVPHARSAAASSAKAPRKPVHVIPRVEYGNEGRYVVICPKRGVLPFEPDTSEWFAWVAEQSSFRFVGKQGHFSAHHEWHVPKGAWRAHRQIRNHSYNLRLALSQELTTAVLEQAAATLQAHLA

SEQ ID NO: 843 - protein, 252 aa, synthetic construct
MTFVSVADACRRLGIDAKTLHHWLAEAHLPLQPHPTDGRKKGLSNDQLQMLAHLHQRRLTALDHDQEAPEALAVVSLPAAWLSLPAQLDALQTQLAALQQQLADLSQRLPPPTLPAVSPPPSAVQKPTSRHSSPPTPAARAGKPPRKPVHVIPRVEYGEQGHYVVICPKDGLLPFEPDSPAWFAWLARQESFRFVGKGGHFSAHHWWRVPTGAWRAHRKIRNHTCNLRLAPTEHLTIAVLEQAAEALQAQLT

SEQ ID NO: 844 - protein, 262 aa, synthetic construct
MTLISLTECCHLLAIDAKTLQRWLALAQLPLLPHPDDGRAKGLTAAQLRLLASAHHRSLPALPDELPAPLPTAPTPAPSLLPPDLLALLQPLQALPALLAALQQQVAALTQRLDPPLLPPPPTPSQAPQGACGTARSIPATLAASSPPSTLPPPKSAPHVIPRVAYDGKGRYVVICPKQGVLPFEPDSPQWFAWLDIVSSFRFVGKQGHFTAHHECLRVPHGAWRAHRNIRNHTRILRLAPSHDLTSAVLEQAAATLQAHLS

SEQ ID NO: 845 - protein, 264 aa, synthetic construct
MPIIALTDCCRRLSIDAKTLRRWLVQAQLPLQRHPTDARLKGITGDHLRLLATAHHRSLPALSGELPPLAPAGHPEAAPLPPELIDLLQTLSALPAQLAALQQQLAALTQGLLRPPHESPATAVPSPAGQTGKGAPTGTKASTRSRLAMAGTPKRPGPPAHVLPLVEYGTDGHYVVICPKHGRLSLEPESSAWFAWLATLSSFRFVGKQGRLTAHREVERLPRAAWRAHRQIRNHTYNLHLGSTECLTLAALEQAAAALQAHLK

SEQ ID NO: 846 - protein, 294 aa, synthetic construct
MTIISLADCCRLLAIDPKTLRRWLSLSHLSVQSHPGDTRLKCLTSEQLQQVAAAHHRSLPASSELHVPPEISALSTPTSAMSETVWGSVVSEVSGPLTDLTQQLSSLQAQVAALQHQLALLTEHLQKEQQWRTRVTKTLEDNSLDTSSESSLDTSLESSLDTSSESSLDTSSESSLEKESVPASIDRRKHPHVLPLVEYGTQGKYVVISPEQGMLSFEPDSPQWFAWLSTLPSFRFVSQHGRFTAFRGYQCSPRTSWWAHRQIRNHSHRHRLGLTASVTIASLELAASSLQALV

SEQ ID NO: 847 - protein, 252 aa, synthetic construct
MAFVSFAQASGRLGIDVKTLRRWITDAQLPLHSYPHDGRKKGVSQEHLQALARLHQRSLAPLPQEPPAPLPSEMPELSTALLVLPERLDALQAQIAALQQQVAALTRLLEQHGPGPCIPLAPTPQTRTAKQTPPAPRSRPAARPPSKSAHVLPRVEYGNEGRYVVICPKQGLLPLEPDTPEWFAWLATQSSFRFVGKLGRFTAHHEWRVPRGAWRAHRQIRNHSYTLRLAPTHDLTIAVLEQTAQALQVHLI

SEQ ID NO: 848 - protein, 263 aa, synthetic construct
MTLIALTECCRLLSIDGKTLRRWLAQAQLPVQAHPSDARCKGLSADHLLVLASAHHRRLAGLPQQWPAPAAPPPTSPELLPELLTAFQMLSALPAQIAALQQQLADLTALVQQQPSRASVTTPHAQRRGVRGSAPAPSRASARSRPAASSRAKPPGPSAQVLPLIEYGVGGSYVVLCPRRGLLALEPESPAWFAELSTLSSFRFVGQRGRFTAHREVERLPRAAWRAHRSIRSHTYNLRLGATEALTVAALEQAAATLHAHLT

SEQ ID NO: 849 - protein, 264 aa, synthetic construct
MTLMSLTDCCRLLAIDAKTLHRWLAQAQLTLQPHPTDARLKGLTRDHLRLLARAHHRSLPPLPEERPAPAETSPAEEPPLPPELLDLLWTLTQLPAQVAALQQQLAELTALVQSHPPRPSVTIPHAQRRAARLGSPTPTKVSARSRPAASSRAQQPGPSVQVLPLIEYGIQGTYVVICPTHGLLALEPDTPEWFAWLATRSSFRFVGKQGRFSAHREVERLPRAAWRAHRSIRSHTYNLRLGSTQSLTIATLEQAAATLHAHLK

SEQ ID NO: 850 - protein, 265 aa, synthetic construct
MTILSLTDCCRLLAIDPKTLRRWLALAQLTLEPHPTDARLKGLTRDQLRMLATAHHRSLPALPEELPAPAPTGPPEEPPPLPRELLDLLQTLTALPAQIAALQQQLAGLTQVLHQLPPQPPVRAYSAQDGAPHMGQPTPAKAAAKSRSAASSATKRPGPPAHVLPLVEYGTQGHYVVICPKHGLLSLQPDTPAWFAWLATLSSFRFVGKQGRLTAHREVERVPRGAWRAHRNIRNHTYNLPLGQTECLTITGLEQAAAALQAHLK

SEQ ID NO: 851 - protein, 260 aa, synthetic construct; identical to SEQ ID NO: 820

SEQ ID NO: 852 - protein, 262 aa, synthetic construct
MTLISLSDCCRLLTIDPKTLRRWLDLAHVPFLAHPTDARIKGITASHLCQIATAHHRILADCPEAAPLPVQALQLQEPPPLSGKLLDVLQTIPELSAQIVVLQERLTELTQLLHPVPVSGSPAQEEPAAMVGEPAPVRATPRSGSATFSSAKRRAAPVHVLPLVEYGTHGGYMIICPEHGLLTFQPDSTEWFAWLATRSSFRFVGQSGRFTAHREQERVPGCAWRAHRQIRNHTYNIRLGATESLTIAALEQAAAELQSHLA

SEQ ID NO: 853 - protein, 260 aa, synthetic construct
MTFVSVAQAAHRLGIDAKTLRRWLVEAQLPLHSHPGDGRKKGVSDEHLQRLAHLHHRQLTSSEVQVPAQLSCQITALPADLLALPEQLCALQTQLAALQQQMADLTRLMRQHAPEPAIPAAQTQPSSMVKPPKKPTRSARSSRPAASATAKTPRKPTHVIPRVEYGEQGHYVVICPKHGLLPLEPDTEEWFAWVAEQDSFRFVGKLGHFTAHHEWRVPKGAWRAHRHIRNHNSIQRLAPNHELTIAVLEQAALALQAHLT

SEQ ID NO: 854 - protein, 256 aa, synthetic construct
MTFVSVAQATRSLGIDAKTLHRWLADAQLPLPCHPHDGRKKGLSEEHLQALARLHQRRLASSEEEGRAQLPCQIPALPADLLWLPEQLAAMQAQLVTLQQQVTDLTRLLQQHRPEPAIPLAPTKPTSTAKSPAKPTRSRPAATAFAKTPPKPVHVIPRVEYGEEGHYVVICPKRGLLPFEPETQEWFAWVAEQDSFRFVGRSGHFTAHHEWRVPKGAWRAHRQIRNHSYTLRLAPNQELTMAVLEQAAEALQAHLT

SEQ ID NO: 855 - protein, 262 aa, synthetic construct; identical to SEQ ID NO: 852

SEQ ID NO: 856 - protein, 256 aa, synthetic construct
MTFVSLAEACRRLSIDAKTLRRWLTDALLPLQSYPHDGRKKGVSSEQLQVLARLHHRSLAPLPQESSAPLPGEMPELSAALLALPERLGALQAQIATLQQQVADFTRLITQHGPGPAIPLAPTQQTRTAKRPPKPTLPAPRSRPVAKPPRKPAHVLPRVEYGPEGRYVVICPKQGLLPLEPDTPEWFAWLAAQSSFRFVGKLGRFTAHHEWRVPRGAWRAHRQIRNHSYTLRLAPTHDLTMAVLEQTAEALQAHLT

SEQ ID NO: 857 - protein, 262 aa, synthetic construct
MIFVSLAEACRRLSIDAKTLHRWLAEAQLALHNHPHDARKKGVSEEYLQMLARLHHRRLTSSEKEEPVQLSCQTPALPADLLSLPEQLAAMQAELVTLQQQVAALSRLLTQPKPEPAPKLSPTEPPRTLKLRAKPTRSAPHSHPTASGAAKTKTPAKPVHVIPRVEYDQEGHYVVICPKHGVLLFEPDTEEWFAWLREHDSFRFVGKQGHFSAHHEWRVKNGAWRAHRHIRNRVSIQRLAPTQELTIAVLEQAAAALQAHLT

SEQ ID NO: 858 - protein, 251 aa, synthetic construct
MTLLSVTDCCRLLAIDAKTLHRWLAQAQLPLQAHPSDARLKGLSRDHLLLVATAHHRRLAALPEELPALAAPPLPQDLLALLSTLSELPAQLAALQQQLSALTQLMAQAAVTPSPGPVLALEPAAPPAAVRSRPAASRAPKPLPKPAHVLALVEYASEGHYVVICPKHGLLPFEPESPQWFAWLATLSSFRFVGQHGRLTAHREVERVPRGAWRAHRNIRNHTSNLRLGSTEALTIAVLEQAAADLQAHLK

SEQ ID NO: 859 - protein, 263 aa, synthetic construct
MTLIALNECCRLLAIDGKTLRRWLAQAELCVQAHPEDARSKGLTYDQLLLLARAHHRRLAGLPPALPAPAGLVAAPISPELSAELLPLLHRLSALPEQIAALEQHVAQLTALLEAPRRPTVTTPTTQRSTVRGHAPTATKAGTKARRAAASPAPRPIPSAQVIPRVEYVQEGHYVVLCPKGGLLPLAPDTPEWFTWLATQSSFRFVGKEGHFSAHHEWRVPRGAWRAHRQIRNHSYTLRLSPTHELTIAVLEQAAAALQAHLK

SEQ ID NO: 860 - protein, 257 aa, synthetic construct; identical to SEQ ID NO: 831

SEQ ID NO: 861 - protein, 260 aa, synthetic construct
MTFVSVAQACRRLGIDAKTLRRWLAEAQLPLHSHPRDGRKKGMSDEHLQTLARLHQRRLAPLPQEPPAPVAGEEPPLPAALLALPEMVCSLQSQVAALQQQVTDLTCLLQQHQQEPAIPAAPAKPSRRSKQSPKLAPLAPRSRLAASARAKTPRKPVHVIPRVEYGKQGHYVVICPQRGVLPFEPDTPEWFAWLAEQSSFRFVGQGGTFSAHHEWRVPRGAWRAHRKIRNRGYSLRLAPSPELTIAMLEQVAATLQAHLK

SEQ ID NO: 862 - protein, 260 aa, synthetic construct
MTFVSFAQATRSLGIDAKTLHRWLADAQLPLQCHPHDGRKKGMSEEHLQVLARLHQRRLASSEEEGPAQLPCQIPALPADLLSLPEQLAAIQAQLVTLQQQVTDLTRLLQQHRPEPAIPLAPTQPTSTAKPPAKPTRSAPRSRPAASASAKTPPKPVHVIPRVEYGEERHYVVICPKRGLLPFEPDTQEWFAWVAEQDSFRFVGRSGHFTAHHEWRVPKGAWRAHRQIRNHGYTLRLAPTQELTIAVLEQAAEALQAHLT

SEQ ID NO: 863 - protein, 256 aa, synthetic construct
MICVSVAQAAHHLGVDAKTLHRWLADAQLPLQRHPDDGRKKGLSQEHLQLLARLHQRRLTSLPEVPPAPMKCEVPPLPAELLTLPEQLSTVQAQLSALHQQVADLTLLLVQQAHAKAGAAAPTPPSKTRTRSPEPAPPAPRSRPVATTPRKPVHVIPRVEYGEGGHYVVICPKRGVLPFEPDTKEWFAWVAEQESFRFMGKMGHFSAHHEWRIPKGAWRAYRKIRNRNYILRLAPNHELTIAVLEQVAEALQAHLM

SEQ ID NO: 864 - protein, 258 aa, synthetic construct
MIFVSVAQATTRLGIDAKTLRRWLAEAQLPLHSCPQDGRKKGVSAEDLQALARRHQRSLAPLPEASPAATAGQGLELPSALLELPEQLGALQAQMAALQQQMAALTHLLQQQAPAPVSPTPQTQPSRTRKRSSTPATLPARPAASAPATTPRKPVHVIPRVEYSEQGHYVVICPKGGLLPFEPDTPEWFAWVAQQDSFRFVGQAGHFTAHHEWRVPKGAWRAHRHLRNRIYIQRLAPNHELTLAVLEQAAAALQAHVM

SEQ ID NO: 865 - protein, 256 aa, synthetic construct
MTFVSLADACRCLGIDAKTLHRWLADAQLPLQNHPGDGRKKGVSQEHLQVLARLHQRSLASLPKMPPAPALSEEPELAAVLLSLPEQLSTLQAQISALQQQVVDLTLLLEQQAPPKAAAAAPTTSGKTSKRPSNPAPSAPRSRSVAKPPRKLVHVIPRVEYVDEKHYVVICPKHGVLPFEADTKEWFAWVAAQSSFRFVGQRGHFTAHHEWRVPRGAWRAHRHIRNHGYTLRLAPAQELTIAVLEQAAEALQAHLK

SEQ ID NO: 866 - protein, 43 aa, synthetic construct
MTINEITRALHELKLPGMAGCWDSLEETHQLDKLTLREGMQMM

SEQ ID NO: 867 - protein, 239 aa, synthetic construct
MQEIEKSLHKLKLPGMADCWTSLCETRRADKLSLRDGLQLMLQTEQDTRKTNRIARLLKEAAFPYPASLEELDYGTVRGVDATTVAQLGTCGFVRNGQTIVINGPTGTGKTYLAVALGDRACRLGFNVAFITMQKLLDRIKLERLQGQEIRFMEKLSRVDMLIIDDFGMKALEGQQQNDFQQIVDDRYRKKALIISSQLPVNDWYAVIGNELIAESCLDRIVHKSIRFQLKGESLRKKY

SEQ ID NO: 868 - protein, 239 aa, synthetic construct
MQEIEKSLHKLKLPGMADCWTSLCETRRADKLSLRDGLQLMLQTEQDTRKTNRIARLLKEAAFPYPASLEELDYNTARGVDATSVAQLGTCEFIRNGQTIVINGPTGTGKTYLAVAMGDRACRLGFNVVFFNMQKLLDRIKLERLQGQEIRFLEKLSRVDMLIIDDFGMKALEGQQQNDFEQIVDDRYRKKALIISSQLPVNDWYAVIGNELIAEACLDRIVHKSIRFQLKGESLRKKY

SEQ ID NO: 869 - protein, 248 aa, synthetic construct
MIIPKNIMTTNEITRALHELKLPGMAGCWDSLEETHQLDKLTLREGMQMMMQYERDTRQNNRVQRLIKNANFRIKASIEELETDTTRGITTSSVSDLCTGNYIINGMTITITGPAGTGKSYFACALGDRACREGIKVLYFTMNMLIENLKLVHLEGRETNFFRKISSHDLLIIDDWGMVKLEGQIQHDFEQIIDDRYNRKATILASQLPISDWYNVFQSELIAEACLDRIVHKALKYQLTGESLRKKY

SEQ ID NO: 870 - protein, 240 aa, synthetic construct
MEHQLQTALKGLKMPGMAACWQSMEETHQSEKLSLRDGLQILIQAEKDSRDSNRIAKLIKNANFRIQALIEELEISETRGVPADIILQLSSGEYIKAGSTVIICGATGTGKSYLACALGNKACRLGYKVAYYTMQKLMDAIRIARLEGKDQKLLDKFDKLDVLIIDDFGMKPIDGQQQNDFEQILDDRYGRKSLIISSQLPVSDWHALFKNELIADACIDRMVHKPVRLQLVGESLRKKY

SEQ ID NO: 871 - protein, 39 aa, synthetic construct
MDPIITSLYNLHLPGMSLCWKNLEETHQTDKLNLRDGLQ

SEQ ID NO: 872 - protein, 110 aa, synthetic construct
MIIPKNIMTINEITRALHELKLPGMAGCWDSLEETHQLDKLTLREGMQMMMQYERDTRQNNRVQRLIKNANFRIKASIEELETDTTRGITTSSVSDLCTGNYIINGMTIT

SEQ ID NO: 873 - protein, 241 aa, synthetic construct
MTTNEITRALHGLKLPGMASCWNSLEETHQLDRLTLREGMQMMVQYERDTRRNNRVQRLIKNASFRLKASIEELETDTARGIATSSVSDLCTGSYITNGMTVIITGPAGTGKSYFACALGDRACREGTKVLYFTMNMLIENLKLVHLEGRETNFFRKISSHDLLVIDDWGMVKLEGQTQHDFEQIIDDRYNRKATILASQLPIADWYSVFQSELIAEACLDRIVHKALKYQLSGESLRKKY

SEQ ID NO: 874 - protein, 168 aa, synthetic construct
MTNETLRTLHDLKLPGMASCWTSLEETHQLDKITLRDGMQLMLQHEQDMRQSNRIERLIKNANFRLKASIEELETDTPRGLSTATVADLASGKYITNGMTIISTGAAGTGKSYFACALGDRACRNGIKVLYFTMNMLIETLRLVHLEGRETNFFRKLCSHELLIIDDF

SEQ ID NO: 875 - protein, 238 aa, synthetic construct
MEEIIKELHSLKLSGMARLWASLGETKRLDKLTLVDGIMLLLQAERDTRTTNRNNRLVKEADFRYSATLEQLQAGSHRGVDSNMLAVLGTGSYIDKGEAILITGAAGVGKSYLATALGNKACHQGYKVCYFNMQKLLGKLKLARVDGTIIKLVAKISRVDLLIIDDFGMKALEGQQQNDFMEIIEDRHGRKATIIASQLPVSKWYDVIGNEVIADAILDRIVHSSHRFDIKGESLRKK

SEQ ID NO: 876 - protein, 141 aa, synthetic construct
MKLPGMADCWTSLCETRRADKLSLRDGLQLMLQTEQDTRKTNRIARLLKEAAFPYPASFEELDYNTARGVDATTVSQLGTCEFVRNGQTIVINGPTGTGKTYLAVALGDRACRLGFNVLFFNMQKLLDRIKLERLQGHEIR

SEQ ID NO: 877 - protein, 241 aa, synthetic construct; identical to SEQ ID NO: 873

SEQ ID NO: 878 - protein, 239 aa, synthetic construct
MEEIIKELHLLKLPGMAGCWTSLGETHQLDKLSLRDGLELLVQAENEARHSNRIAKLIKEARFRDKACIEELDMDNARGIDTGVVAKLGTCEYIKNGIPVLITGACGCGKSFLAAALGDKACRMGYHVCYYNMQKLLDAIKLARMEGHEVHFFDKLIKCDLLILDDFGMKKLEGQQQNDFEQIIDDRYNRKSLIIVSQLSIADWYDVINNELIAEACLDRIVHKAVRFQLKGDSLRKKY

SEQ ID NO: 879 - protein, 241 aa, synthetic construct
MTINEITRALHELKLPGMAGCWDSLEETHQLDKLTLREGMQMMMQYERDTRQNNRVQRLIKNANFRIKASIEELETDTIRGITTSSVSDLCTGNYITNGMTITITGPAGTGKSYFACALGDRACREGIKVLYFTMNMLIENMKLVHLEGRETNFFRKISSHDLLIIDDWGMVKLEGQIQHDFEQIIDDRYNHKATILASQLPISDWYNVFQSELIAEACLDRIVHKALKYQLTGESLRKKY

SEQ ID NO: 880 - protein, 240 aa, synthetic construct; identical to SEQ ID NO: 870

SEQ ID NO: 881 - protein, 239 aa, synthetic construct
MEQIQSSFHKLHMPGMASCWKILTETHQADKLTLSDGLELLLQSELDSRQNNRIERLIRNALFRQMATVEELDPSESRGISAGALSQLATGEYLKNGTTIIISGPTGTGKSFLATALGERACRLGYRVRYYTVQRMMDELKLARLEGKELKFFEKMEQLDLLIIDDFGMKKLEGQQQNDFEQVIDDRYHKKSLIISSQLAVTDWYSVFSNEMLAEACLDRVVHKSIRFELKGDSMRKKY

SEQ ID NO: 882 - protein, 152 aa, synthetic construct
MKEIEKTLHGLKLPGMADCWTSLNETHRADKLTLRDGLQLMLQAEQDNRKINRIARLTKQAAFPYVASFEQLDYDTARGVDAATVAQLGTGDFIRKGQTVVISGATGTGKTYLAVALGDRACRLGFNVAYVNMQKLIDRIKLERLQGQEIRF

SEQ ID NO: 883 - protein, 240 aa, synthetic construct
MTDETVRFLHDLKLPGMAACWTSLEETHQLDKVSLRDGMQLMLQHERDTRQANRIARLIKNAGFRQKGTIEELEMDTTRGLSTADVTEQATGGYIRDGRFTIVIGPTGTGKTYYICALGERACRQGYKTLYFTMNTLIDQLRLVHLEGRETNFFHKLSAHDLLIIDDFGMVRLEGQIQHDFEQIIDDRYNRRALILASQLPVADWYSVFQSELIAEACLDRLVHKSKRFELKGESLRKKY

SEQ ID NO: 884 - protein, 248 aa, synthetic construct
MIIPKNIMTTNEITRALHELKLPGMAGCWNSLEETHQLDKLTLREGMQMMMQYERDTRQNNRVQRLIKNANFRIKASIEELETDTTRGITTSSVSDLCTGNYIINGMTITITGPAGTGKSYFACALGDRACREGIKVLYFTMNMLIENLKLVHLEGRETNFFRKISSHDLLIIDDWGMVKLEGQIQHDFEQIIDDRYNRKATILASQLPISDWYNVFQSELIAEACLDRIVHKALKYQLTGESLRKKY

SEQ ID NO: 885 - protein, 248 aa, synthetic construct; identical to SEQ ID NO: 869

SEQ ID NO: 886 - protein, 240 aa, synthetic construct; identical to SEQ ID NO: 870

SEQ ID NO: 887 - protein, 239 aa, synthetic construct
MMQIETQLGRLRLHGMSQGWKAMLETRRHTELSLQEGLEILLQSEQQERENRRFDRLTKGARFRYKATIDEISMQASRGIDKDLVMRLATGDYLSKGESVLITGATGCGKSFIASALGHQACAQGYKVAYYNTQKLLMRTKMARAEGTIIKLLESISKTALLIIDDFGLTHLEHQQQMDLMELIEDRHGRASTIIASQLPVANWFDIIGEETIADAILDRLVHTSHRIELKGESLRKKL

SEQ ID NO: 888 - protein, 239 aa, synthetic construct
MDPIITSLYNLHLPGMSLCWKNLEETHQTDKLNLRDGLQLLLQNEIDNRQGNRVVRLIKQAGFKINASIEELDTSGVRGINSASITQLCTGEYLKKGSTIIISGPTGTGKSFLATALGERACHQGYRVRYFTLQRIMDDLRLARLEGHEIKFFEKMERIDLIIIDDFGMKTLEGQQQNDFEQIIDDRYHKKSIIIASQLAVKDWYSVFKNEMIAEACLDRIVHKSIRFELKGDSLRKKY

SEQ ID NO: 889 - protein, 248 aa, synthetic construct
MIIPKNIMTINEITRALHELKLPGMAGCWDSLEETHQLDKLTLREGMQMMMQYERDTRQNNRVQRLIKNANFRIKASIEELETDTIRGITTSSVSDLCTGNYITNGMTITITGPAGTGKSYFACALGDRACREGIKVLYFTMNMLIENMKLVHLEGRETNFFRKISSHDLLIIDDWGMVKLEGQIQHDFEQIIDDRYNHKATILASQLPISDWYNVFQSELIAEACLDRIVHKALKYQLTGESLRKKY

SEQ ID NO: 890 - protein, 248 aa, synthetic construct; identical to SEQ ID NO: 889

SEQ ID NO: 891 - protein, 194 aa, synthetic construct
MEHQLQTALKGLKMPGMAACWQSMEETHQSEKLSLRDGLQILIQAEKDSRDSNRIAKLIKNANFRIQALIEELEISETRGVPADIILQLSSGEYIKAGSTVIICGATGTGKSYLACALGNKACRLGYKVAYYTMQKLMDAIRIARLEGKDQKLLDKFDKLDVLIIDDFGMKPIDGQQQNDFEQILDDRYGRKSL

SEQ ID NO: 892 - protein, 240 aa, synthetic construct
MTDETERALHALKLPGMANCWTSLHETHQLDKLSLRDGMQLMLQAERDKRECNHIARLIKNAGFRNKATLEELEVDTVRGIPAAKAAELGTCEYIEQGMTIIITGPAGTGKSYFAQALGERACRLNYKTMYFTMNKLAEALKLARLEGREVNFFKKLANQDLLIIDDIGMSKIQGDLQNDFEQIIDDRYHDKALILCSQLPVADYYGLFQSELIAEACLDRIVHKSMRFQLAGDSLRKKY

SEQ ID NO: 893 - protein, 230 aa, synthetic construct
MEEIINMFHSLKLSGMSDCWASLSETHRIDKLSFSDGLQLLLQTEQDTRQTKRINRLMKSAKFTYAASLEELDLTPERGIDPGEISQLGTCNFVRDGHTILITGPAGTGKSYLAMALGDKACRLNYKVAYFNMQKLIEEIKLQRLQGREINFFEKIYKIDLLILDDFGMSKIEGQQQNDIEQIVDDRYHKKALVITSQLPVSDWYSVIGNELIAESFLDRIVHKSIRFRL

SEQ ID NO: 894 - protein, 162 aa, synthetic construct
MEEIINMFHSLKLSGMSDCWASLSETHRIDKLSFSDGLQLLLQTEQDTRQTKRINRLMKSAKFTYAASLEELDLTPERGIDPGEISQLGTCNFVRDGHTILITGPAGTGKSYLAMALGDKACRLNYKVAYFNMQKLIEEIKLQRLQGREINFFEKIYKIDLL

SEQ ID NO: 895 - protein, 248 aa, synthetic construct; identical to SEQ ID NO: 869

SEQ ID NO: 896 - protein, 241 aa, synthetic construct; identical to SEQ ID NO: 879

SEQ ID NO: 897 - protein, 239 aa, synthetic construct; identical to SEQ ID NO: 868

SEQ ID NO: 898 - protein, 240 aa, synthetic construct; identical to SEQ ID NO: 870

SEQ ID NO: 899 - protein, 249 aa, synthetic construct
MLNFITNNIMTDETERQLHELRLPGMANCWTSLQETHQLDKLSLRDGMQLMLQAERDKRESNHIARLIKNAAFRDRASIEELEVDTVRGIPAASVAELGTGGFIDHGSTIIMTGPAGTGKSYFAQAIGDRMCRLGHKVMYFTMAKLADMLKLVRIEGRQVNFFKKLAALDLLIIDDWGMSKLTGDLQNDFEQIIDDRYNRKALIMCSQLPVADWYNVFQSELIAEACLDRIVHKAIRFNLQGESLRKKY

SEQ ID NO: 900 - protein, 239 aa, synthetic construct
MEEIVNMFHSLKLSGMSDCWDSLNETHRIDKLSFSDGLQLLLQTEQDTRQTKRINRLMNSAKFTYAASLEELDLTPERGIDSGEISQLGTCNFIRDGHTILITGPAGTGKSYLAMALGDKACRLNYRVSYFNMQKLMEEIKLQRLQGHEIKFFEKISKLDLLILDDFGMFKLQGQQQNDIEQIVDDRYRKKALIITSQLPVSDWYDVIGNELIAESFLDRIVHKSIRFRLQGYDNNIVM

SEQ ID NO: 901 - protein, 240 aa, synthetic construct
MSNETERTLHELKLPGMASCWSSLEETHQLDKLTLREGMQIMLQYERDTRGNNRIQRLIKNAGFRLRASMEELETDTARGIQACSAADLATGNYITGGMTVIITGPAGTGKSYFACALGDRACRNGRKVLYFTMNMLIENLKLAHLEGRETNFFRKLNAHDLLIIDDFGMVKLDGQIQHDFEQIIDDRYNRKALILASQLPVADWYDVFQSELIAEACLDRIVHKAIKFDLKGESLRKKY

SEQ ID NO: 902 - protein, 240 aa, synthetic construct
MNNETERTLHELKLPGMASCWSSLEETHQLDKLTLREGMQIMLQHERDTRGNNRIQRLIKNAGFRLKASMEELETDTARGIKACSAADLATGNYITGGMTVIITGPAGTGKSYFACALGDRACRNGQKVLYFTMNMLIENLKLVHLEGRETNFFRKLNAHDLLIIDDFGMVKLDGQIQHDFEQIIDDRYNRKALILASQLPVTDWYDVFQSELIAEACLDRIVHKAIKFTLSGESLRKKY

SEQ ID NO: 903 - protein, 240 aa, synthetic construct
MSNETERTLHELKLPGMASCWSSLEETHQLDKLTLREGMQIMLQYERDTRGNNRIQRLIKNAGFRLRASMEELETDTARGIQACSAADLATGNYITGGMTVIITGPAGTGKSYFACALGDRACRNGRKVLYFTMNMLIENLKLVHLEGRETNFFRKLNAHDLLIIDDFGMVKLDGQVQHDFEQIIDDRYNRKALILASQLPVADWYDVFQSELIAEACLDRIVHKAIKFDLKGESLRKKY

SEQ ID NO: 904 - protein, 100 aa, synthetic construct
MQEIEKSLHKLKLPGMADCWTSLCETRRADKLSLRDGLQLMLQTEQDTRKTNRIARLLKEAAFPYPASLEELDYNTARGVDATSVAQLGTCEFIRNGQTI

SEQ ID NO: 905 - protein, 239 aa, synthetic construct
MDEIESSLHTLRLPGMAECWSSLSETHRLDKLSLRDGMQLLLQTERDTRFDHRIAHLIKDAHFRCQATIEELELDTARGVDAATVSQLGTGEYIKNGSTVVLCGPAGTGKTFLATALGEKACRQGMHVRYYTMQKMLDALRLARLEGHETRFFEKMEKMDLLIIDDFGMRTLEGQQQNDFEQIIDDRYRNKALIISSQLDVADWYKVFTNELIAEACLDRLVHKSIRFHLDGESLRKKY

SEQ ID NO: 906 - protein, 245 aa, synthetic construct
MSDIERIKEKLIALRLKGMATELDTILKRASEKNLNFLSTLSVLADIELQLRRQNAISLRWRQSKLDEKITVDQFDFDHHKSRKDQKQRILNLMSLDFVAQHKDVILIGNPGTGKTFLAKCIAYAACNANIKVLFTTAIDMINHLIAAEADHSLLKKLHHYQSQDLLVCDELGYLSLGPQGSHLFFQVISHRHQKRATLVTTNLPFADWGNVFDSTTVATAIADRLVHNSQVLILGGQSYRRKEK

SEQ ID NO: 907 - protein, 242 aa, synthetic construct
MDSLREKLSKLRLKVVSQHLEQVLKEAKDKNLSILAVLQRLADLELEYRWQAAIKLRFTQSRLPESLTIDQFDFNHHKSRKEQKERILSLLDLEFVREKMDVILIGNPGTGKTFIAQALGFAACNANLRVLFTSAMDMINHLAAAEADHSLLRKLQHYRSPDLLIVDELGYLALGQQGSNLFFQIISARHQKKSTIVTTNLPFADWGKVFDSTTVATAIADRLVYRSEVLILEGKSYRRREK

SEQ ID NO: 908 - protein, 246 aa, synthetic construct
MPDLEDLKEKLIRLRLKTMAQHLDLVLDQAAQKNLNGVATLQRLADHELEARRQTAITSRYRQSRLVDKPTLDQFDFHHHKSRLDQKTQILNLFSLDFIAQRRDVLFIGNPGTGKTFLAKALVFAACNANIKCRFTTAMDMINQLTAAEADHSLVRKLHEFQTPDILAIDEIGYLPLGPQGSNLFFQVISQRHEVKSTALTTNLPFTDWGNIFDSTTAATAIADRLVCNSEVLILGGPSYRRKIKT

SEQ ID NO: 909 - protein, 243 aa, synthetic construct
MSVSIEVVSQDLKALKLSVMAAHLEGVLEQARQKNLGILDILKRLLDAEQEERWKNAVSRRFSQSGITERVSIDQFDFHHHKSREDQKTKILELLNLDFIEKKQDIIFIGNPGTGKTMLAKCIATSACNANLKVLFTSAIDMINQLVAAELDRSLIRKLRHYQTPDLLVCDELGYLPLGSQGSNLFFQVISQRHTQRSTILSTNLPFAQWGKVFDSNTVASAIADRLVYNSEIIILGGTSYRR

SEQ ID NO: 910 - protein, 245 aa, synthetic construct
MTELDHLKDKLARLQLRAMVQNLEPAVRDAAEQNLGVLTTLNRLADLELERRWLNAVKLRWEQARLTEKRTIDQFDFDHHKSRKEQKTRILNLLSLEFVKERMDVILIGNPGTGKTFLAQCIAAQACNANIKVLFTSAVDMINHLIAAEADHSLLKKLEYYQSPALLVCDEIGFLPLGQQGSNLFFQVISARHQKRSTILTTNLPFAEWGKIFDSTTVATAIADRLVHRSEVLILEGTSYRRKEH

SEQ ID NO: 911 - protein, 242 aa, synthetic construct
MDSLREKLSKLRLKVVSQHLEQVLKEAKDKNLSILAVLQRLADLELEYRWQAAIKLRFTQSRLPESLTIDQFDFNHHKSRKEQKERILSLLDLEFVRDKMDVILIGNPGTGKTFIAQALGFAACNANLRVLFTSAMDMINHLAAAEADHSLLRKLQHYRSPDLLIVDELGYLALGQQGSNLFFQIISARHQKKSTIVTTNLPFADWGKVFDSTTVATAIADRLVYRSEVLILEGKSYRRREK

SEQ ID NO: 912 - protein, 242 aa, synthetic construct
MDSLREKLSKLRLKVVSQHLEQVLKEAKDKNLSILAVLQRLADLELEHRWQAAIKLRFTQSRLPESLTIDQFDFNHHKSRKEQKERILSLLDLEFVREKMDVILIGNPGTGKTFIAQSLGFAACNANLRVLFTSAMDMINHLAAAEADHSLLRKLQHYRSPDLLIVDELGYLALGQQGSNLFFQIISARHQKKSTIVTTNLPFADWGKVFDSTTVATAIADRLVYRSEVLILEGKSYRRREK

SEQ ID NO: 913 - protein, 245 aa, synthetic construct
MIETDRLKEKLVNLHLKAMAQQLDGVLQQAQEKNESFASSLNRLVDLEMERRHQSAIKLRWEQSRLPDRATIDQFDFDHHKTRKEQKTRILNLLDLEFIRQRADVILIGNPGTGKTFLAKCIALAACNANMKVLFTSAMDMINHLIAAEADRTLLKKLHYYQSPTLLVVDELGYLSLGQQGSDLFFQVISSRHQNRSTILTTNLPFADWGKIFDSTTAATAIADRLVQRSEILVLEGTSYRRKEK

SEQ ID NO: 914 - protein, 245 aa, synthetic construct
MTEEIIAKSNELKLKGFAANIEETLSYAQDKNWSYKKVLLHLMNLEIERRKQSRIDLRFRQSRLNEQITIDQFDFDYHKSRKDQKNTILNLTNPEFIHQKKDVILIGHPGVGKTWLGKCVGYTATQEGIQVLFTTAMDMINQLIAAEADHSLVKKLAYYQSPALLIIDEIGYLPLGSHGSNLFFQVISSRHQAKSTLITTNLPFSDWGKIFDSTTAATAIADRLVHHSEILVLEGPSYRKKEKKS

SEQ ID NO: 915 - protein, 243 aa, synthetic construct
MSEIDKLKEKLIKLRLKETAQQLEEILARAAAKNLGIVNTLNLIADIEIEQRWQNAIKLRYKQSGLNDKIFIDQFDFNHHKSRKEQKQRILELVTLEFISKRMDGIFIGNPGTGKTFLAKCIATEACNKNIKVLFTTAINMINHLIAAEADKSLLKKLQYYQSPELLVCDELGYLSLGEQGSHLFFQVISQRHQVKSTLLTTNLPFADWGKVFESTTVATAIADRLVHNSQVLVLGGKSYRRK

SEQ ID NO: 916 - protein, 245 aa, synthetic construct
MSDIERIKEKLIALRLKGMAAELENVLKRAGEKNRNFLSTLSVLADIELQLRRQNAISLRWRQSKLDEKITVDQFDFNHHKSRKDQKQRILNLMSLDFVAQHKDVILIGNPGTGKTFLAKCIAYAACNANIKVIFTTAIDMINHLIAAEADHSLLKKLHYFQSPDLLVCDELGYLSLGPQGSHLFFQVISHRHQKRATLLTTNLPFADWGNVFDSTTVATAIADRLVHNSEVLILGGQSYRRKEK

SEQ ID NO: 917 - protein, 245 aa, synthetic construct
VTEELIEKCNELKLKGFASHMEEALTYAQEKNWSYKRLLLHLMGLELERRKRSRIELRYRQSKLNEQITIDQFDFNYHKSRNNQKNTILNLTNPEFISQKKDVILIGHPGVGKTYLAKCIGYMATQAGIKVLFTTAMDMINQLIAAEADHSLVKKLNAYQSPALLIIDEIGYLPLGPHGSNLFFQVISSRHSVKSTLITTNLPFSEWGKIFDSTTAATAIADRLVHHSEILVLEGTSYRKKEKKN

SEQ ID NO: 918 - protein, 270 aa, synthetic construct
MTSLESKLDALRLVGMQSRLETVLAEASRRNLSLAASLEWLADLELEERRSRSIERRFRQSRLLVRTGIEDFNFQHHKSRMSLKSRILRLLDLDFIAQGTNLVIIGNPGTGKTFLAKIIGWKACQANSRVLFTSAMDMLNQLLASQLDHSLVRKLKVYTAPSLLVCDEVGYLSLDQQTSNLFYQVISTRHAERRSTVLTTNTPFSDWGNILYNTTIATAIADRLVENSEVFLLGGESLRKAKKARPRKPKAGSEEAPPCDDNPDRRSPAG

SEQ ID NO: 919 - protein, 245 aa, synthetic construct
MTDRQQLHGKLTRLRLKAMAAHLDEVLDRAGVKNYGPAEVLTSLADIEAEHRWHNSIALRWRQSALNEKLTIDQFDFNHHRSRQEQKTRILDLFSLDFIERHMDVILIGNPGTGKSFIAKALAYAACNANIKVLFTTAMDMINNLIAAEADRSLLKKLYSYQTPDLLVCDELGYLSLGQQGSNLFFQVISQRHNQKSSILTTNLSFADWGNVFDSTTVATAIADRLVHNSEVLVLGGKSYRGKMK

SEQ ID NO: 920 - protein, 256 aa, synthetic construct
MTTSNESLLESVKEKLKILRLKSSADNIQQILERAEKQNVSTLQVIDRLLDLELERKRQCRISLKYKQSKLFEKPTIDQFDFHFHVSRMKQKARIVHLLDLAFIQQRKDIIFIGNTGLGKSYLAKCLAYAATQAGVGALFTTAMDMINQLTAAEADHSLLKKLHLYQAPEVLAIDEVGYLPLGNHGSNLFFQVISARHEKKSTIITTNLPFADWAKIFDSTTVASAIADRLVHNSEVIIFEGPSYRTRAKAKQVDD

SEQ ID NO: 921 - protein, 248 aa, synthetic construct
MNETRIESVLEKLKSLKMKTAAENLARILQQAEKQNMSPLMVIEALIDIECEARQKNRIHQRFKQSRLLEKPTLDQFDFHFHVSRKKQKTRILDLMDISFLSQKKDVLFIGNTGLGKSFLAKCIAFAATQRGIKTLFTNAMDMINLLTAADVDRSLYKKLRDYQTPDLLIIDEVGYLPLGVQGSNLFFQVISARHQKKSTVITSNLVFAEWGNIFDNTTVATAIADRLVHNSEVIIMEGPSYRTKNKS

SEQ ID NO: 922 - protein, 246 aa, synthetic construct
MSDLETLKNKLIQIRLKTMAQQLDAVLDQAAQKNLNLPAVLNRLVDYELEARRQTAITLRYRQSQLSDKPTIDQFDFHHHKSRLDQKTLILNLFSLDFISKHQDVILIGNPGTGKTFLAKSLVFAACNANIKCLFTNTMDMINHLIAAEADHSLLKKLHFYQSPDLLVCDELGYLSLGPQGSHLFFQVISQRHTVKSTLLTTNLPFADWGKVFDSTPVATAIADRLVHNSEVLILGGPSYRRKNKS

SEQ ID NO: 923 - protein, 217 aa, synthetic construct
MSDLEDLKEKLIRLRLKTMAQNLDLVLDQAAQKNLNGLATLNRLADHELEARRQTAITSRYRQSHLVDKPTLDQFDFHHHKSRLDQKTQILNLFSLDFIAKGQNVLLIGNPGTGKTFLAKALVFAACNANIKCRFTTAMDMINQLTAAEADHSLVRKLHEYQTPDILAIDEIGYLPLGPQGSHLFFQVISQRHEVKSNVLTTNLPFADWGNIFDSTT

SEQ ID NO: 924 - protein, 246 aa, synthetic construct
MTTELDQLKDKLARLQLRAMMQNLETVLREAGEKNLGFLSSLNRLVDLELERRWQNAIKLRWEQAKLYEKCTIDQFDFDHHKSRKEQKTRILNLLPLEFISDRMDVILIGNPGTGKTFLAKCIATAACNANIKVLFTTAVDMINHLIAAEADRSLLKKLEYYQSPALLVCDEVGYLSLGQQGSNLFFQVISARHQKKSTILTTNLPFADWGKVFDSTTVATAIADRLVHRSEVLILEGTSYRRKQH

SEQ ID NO: 925 - protein, 242 aa, synthetic construct
MDSLSEKLTKLRLKVMAQHLEHVLEEAKKKNLSILAVLHRLADLELEYRWQAAIKLRFAQSRLSDRLTIDQFDFNHHKSRKDQKERILSLMDLEFARERMDVILIGNPGTGKTFIAQSIGFAACNANMRVLFTSAMDMINHLAAAEADHSLLRKLHHYRSPDLLIVDELGYLALGQQGSNLFFQIISARHQKKSTIVTTNLPFADWGKVFDSTTVATAIADRLVYRSEVLIMEGKSYRRREK

SEQ ID NO: 926 - protein, 245 aa, synthetic construct
MIETVIEKCKQLRLKACSQNLFEVIEQSTKQNWSPLETISHLFDLELEYRQKNRIALRFKQSKLFEKPTIDQFDFHHHSSRKKQKSKILNLMTLEFIRQKMDIILIGNPGVGKSFLAKCIAYTATQAGKKVLFTTAMDMINQLIAAEADHSLLKKLHHYQSQDLLAVDEIGYLPLGQQGSNLFFQVISQRHQTKSTIITTNLPFADWGKIFDSTTVATAIADRLVHNSQILILEGSSYRKKTKNS

SEQ ID NO: 927 - protein, 242 aa, synthetic construct
MDQLKEKLVKLRLKGMADQLEPVLKKAGEKNLDFLSTFDLLVDIEVDRRWQNAIALRWRQSRLNEKITIDQFDFNHHKSRKDQKQRILDLLNLDFISRHMDVILIGTPGTGKTFLAKSVAYAACNANIKVLFTTAIDMINQLIAAEADHSLLKKLRYYQSPDLLVCDELGYLSLGPQGSHLFFQVISQRHQEKSSLLTTNLPFADWGKVFDSTTVATAIADRLVHNSEVLVLEGESYRRKNQ

SEQ ID NO: 928 - protein, 245 aa, synthetic construct
MTELEQLKEKLARLQLKAMAQNLEVAIREAAEKNLGILTSLNRLADLELQRRWLNAIKLRWEQARLTEKFTIDQFDFDHHKSRKDQKTRILNLLSLEFVKERMDVILIGNPGTGKTFVAQCIAAAACNANIKVLFTSAVDMINHLIAAEADHSLLKKLEYYQSPALLVCDEIGFLPLGQQGSNLFFQVISARHQKKSTLLTTNLPFADWGKIFDSTTVATAIADRLVHRSEVLILEGTSYRRKEH

SEQ ID NO: 929 - protein, 256 aa, synthetic construct
MPLSQKGETKTMSDIERLKEKLIALRLKGMAAELENVLNRAGEKNLNFVSTLSVLADIELQLRRQNAISLRWRQSKLDEKITVDQFDFDHHKSRKNQKQRILNLMSLDFVAQHKDVILIGNPGTGKTFLAKCIAYAACNANIKVLFTTAIDMINHLIAAEADHSLLKKLHYFQSPDLLVCDELGYLSLGPQGSHLFFQVISHRHQKRATLLTTNLPFADWGNVFDSTTVATAIADRLVHNSQVLILGGQSYRRKEK

SEQ ID NO: 930 - protein, 245 aa, synthetic construct
MSDIERLKEKLIALRLKGMAAELENVLKRAGDKNLNFLSTLSVLADIELQLRRQNAISLRWRQSKLDEKITVDPFDFDHHKSRKDHKQRILNLMSLDFVAQHKDVILIGNPGTGKTFLAKCIAYAACNANIKVLFTTAIDMINHLIAAEADHSLLKKLHYYQSPDLLACDELGYLSLGPQGSHLFFQVISHRHQKRATLLTTNLPFADWGNVFDSTTVATAIADRLVHNSEVLILGGQSYRRKEK

SEQ ID NO: 931 - protein, 245 aa, synthetic construct
MIETVIEKSKALSLSAVVQHLPETMDISQQKNWSPLQIIDHLLAQELERRKNNRIELRFKQSKLTERFTIDQFDFDHHPSRKGNRNKILSLTTQEFIDNKQDVVLIGNPGTGKTFLIKCFAYAATQAQVKVLFTTAMDMINQLIAADADKSLLKKLHIYQSPDLLVIDELGYLPLGIQGSNLLFQVISARHGKKSTAISTNLPFAAWGKIFDSTTVATAIADRLVSNSEILVLEGESYRKKIRKK

SEQ ID NO: 932 - protein, 246 aa, synthetic construct
MTDLEGLKEKLIRLRLKTMAQHLELVLDQAAQKNLNGVDLLHRLADHELEARRQTAITSRYRQSRLVDKPTLDQFDFHHHKSRLDQKTQILNLFSLDFIAKHRNVLFIGNPGTGKTFLAKALVFAACNANIKARFTTAMDMINHLTAAEADHSLVRKLQEYQTPEVLAIDELGYLPLGPQGSHLFFQVISQRHEVKSTVLTTNLSFAEWGNIFDSVTAATAIADRLVSRAEVLILGGPSYRRKLKS

SEQ ID NO: 933 - protein, 246 aa, synthetic construct
MPDLEDLKEKLIRLRLKTMALHLDLVLEQAAQKNLNGVDLLHRLADHELEARRQTAITSRYRQSHLLDKPTLDQFDFHHHKSRLDQKTQILNLFSLDFIAQRRDVLFIGNPGTGKTFLAKALVFAACNANIKCRFTTAMDMINQLTAAEADHSLVRKLHEYQTPDLLAIDEIGYLPLGPQGSNLFFQVISQRHEVKSTALTTNLIFADWGNIFDSTTAATAIADRLVCNSEVLILGGPSYRRKLKS

SEQ ID NO: 934 - protein, 242 aa, synthetic construct
MDSLREKLSKLRLKVMSQHLEQVLKEAKDKNLSILAVLQRLADLELEYRWQAAIKLRFTQARLPESLTIDQFDFNHHKSRKEQKERILSLLDLEFVREKMDVILIGNPGTGKTFIAQSLGFAACNANLRVLFTSAMDMINHLAAAEADHSLLRKLQHYRSPDLLIVDELGYLALGQQGSNLFFQIISARHQKKSTIVTTNLPFADWGKVFDSTTVATAIADRLVYRSEVLILEGKSYRRREK

SEQ ID NO: 935 - protein, 255 aa, synthetic construct
MPPLSKGETTMTELDQLKEKLARLQLRAMAQNMDTTVRDAAEQNLGILSVINHLADLELERRWLNAVKLRWEQARLTEKRTIDQFDFDHHKSRKEQKTRILNLLSLEFIRERMDVILIGNPGTGKTFLAQCIAAQACNANIKVLFTSAVDMINHLIAAEADHSLLKKLEYYQSPALLVCDEIGFLPLGRQGSNLFFQVISARHQKKSTILTTNLAFAEWGKIFDSTTVATAIADRLVHRSEVLIMEGTSYRRKDH

SEQ ID NO: 936 - protein, 246 aa, synthetic construct
MTELETLKEKLLQLRLKTMAQNLDLVLEQAAQKNLQPTAILHRLVDHELEARRQTAIALRYRQSHLLDKPTLDQFDFHHHKSRLDQKTQILNLFALDFIAQRRNVLFIGNPGTGKTFLAKALIYAACNANIKARFTTAMDMINHLIAAEADHSLVRKLQEYQTPDVLLIDEIGYLPLGPQGSHLFFQVISQRHEFKSTLLTTNLSFAEWGNIFDSVTAATAIADRLVSRAEVLILGGPSYRRKIKS

SEQ ID NO: 937 - protein, 232 aa, synthetic construct
MSRQLDQTLSEAATKNLSVAATLEWLADMELEARRDRAIARRFKHSRLQTQPSIDAFHFQHHKTRLQNKNRILRLLDLQFLEKGTSIVIIGNPGVGKTFLAKILGWRACQANQRVLFTTAMDMLNHLLASQVDHSLVRKLKTYTEPALLICDEVGYLALDQQTSNLFYQVISTRHSQKRSTIITTNTAFSDWGNILFNTTIATAIADRLVENSEIFLLGGDSLRKANKGEPA

SEQ ID NO: 938 - protein, 236 aa, synthetic construct
MSRHVETTLTEAAAKNLSASATLEWLADMELEARKQRAIERRYKCARLQAQPSIDAFQFQHHKTRQQAKPRILRLLDLEFLRKGTNLVLIGNPGVGKTFLAKIIAWRACQANQRVLFTAAMDMLNHLLASQVDHSLVRKLKTYTEPTLLVCDELGYLALDQQTSNLFYQVISTRHSQKRSTIITTNTAFSDWGNILFNTTIATAIADRLVENSEVFLLGGESLRKPKNPTSPAEKS

SEQ ID NO: 939 - protein, 235 aa, synthetic construct
MSRQIEATIADAAARNLSVVATLELLADMELESRNGRAIERRFKSSRLQTQASIDAFHFHHHKSRVQAKNRILRLLDLAFLRQGTNLVLIGNPGVGKTFLARVIGWKACQANQRVLFTTAMDMLNHLLASQVDHSLVRKLKTYTEPTLLIVDELGYLSLDQQTSNLFYQVISTRHSQKRSTIITTNTPFSDWGNILFNTTIATAIADRLVENSEIFLLGGDSLRKASRNSTPPEE

SEQ ID NO: 940 - protein, 235 aa, synthetic construct
MSRQLETTLTEAATKNLSAAATLEWLADMEIEARSRRAIERRFRSSRLQAQPSIDAFHFPHHKSRMQAKPRLLRLLDLSFLAKGTNIVLIGNPGVGKTFLAELIAWRACQANQRVLFTTAMDMLNHLLASQVDHSLVRKLKAYTEPSLLVCDELGYLALDQQTSNLFYQVISTRHSHKRSTVITTNTPFSDWGNILFNTTIATAIADRLVENSEIFLLGGDSLRKANKNPDPPAE

SEQ ID NO: 941 - protein, 235 aa, synthetic construct
MSQNLDQILTDAAAKNLSLSVALEALADRELEVRNSRAIERRLRFSRLGAGHSIDSFQFNHHKSRTQMKSRVLRLLDLEFLHKGANIVIIGNPGVGKTFLAKIIGARACQANQRVLFTTAMDMLNHLLASQVDHSLVRKLKIYTEPSLLVCDELGYLSLDQQTSNLFYQVISTRHARKRSTVITTNTAFSDWGNILYNTTIATAIADRLVENSEIFLLGGDSLRKTNKNPNPPAD

SEQ ID NO: 942 - protein, 235 aa, synthetic construct
MSQNLDQILADAAAKNLSLAAALESLADRELEARNGRAIERRLRFSRLGTRSSIDSFQFNYHKSRTQMKSRVLRLMDLEFLQKGANIVIIGNPGVGKTFLAKIIGSRACQANQRVLFTTAMDMLNHLLASQVDHSLVRKLKIYTEPSLLVCDELGYLSLDQQTSNLFYQVISTRHARKRSTVITTNTAFSDWGNILYNTTIATAIADRLVENSEIFLLGGDSLRKTNKNPNPPAD

SEQ ID NO: 943 - protein, 235 aa, synthetic construct
MSRQIETTIADAAARNLSVSATIELLADVELDARNGRAIERRFKLSRLQTQASIDAFHFHHHKSRVQAKNRILRLLDLAFLRQGTNLVLIGNPGVGKTFLARVIGSKACQANQRVLFTTAMDMLNHLLASQVDHSLVRKLKIYTDPTLVIVDELGYLSLDQQTSNLFYQVISTRHSQKRSTIITTNTPFSDWGNILFNTTIATAIADRLVENSEIFLLGGESLRKAIRNSAPPEE

SEQ ID NO: 944 - protein, 237 aa, synthetic construct
MTMAQKLETLTQEAANQNLSFAAALERLADLELETRHGHAIERRFKFSRLPAQPTLDQFQFTHHKSRQQVKSRLLHLLDLDFLQQGTNVVIIGNPGVGKTFLAQILGWRACQANVRVLFTTAMEMLNHLLASQVDHSLVRKLKVYTEPTALIVDELGYLALDQQTSNLFYQVISTRHARKRSTIITTNTAFSDWGNILYNTTIAAAIADRLVENSEIFLLGGESLRKAQKSPPPAAA

SEQ ID NO: 945 - protein, 261 aa, synthetic construct
MTALTDKLAQLKLDFMAKELDRVLTDAAAKSLSPSAALEWLTDLELEGRRGRSVERRFRLSKLQARHGIESFNFNHHKSRQQMKSKLLHLLDLDFIKQGTNIILIGNPGTGKTFLSKIIGWKACQTNLRVLFTPAMQMLNQLVASQADHSLVRRLKTYTDPTLLVCDELGYLSLDQQTSNLFYQVISTRHAERRSTVITTNTIFSEWGNILFNTTIAAAIADRLVENSEVFLMGGPTWRNPKNGQAAPQPEGVAARSGAAL

SEQ ID NO: 946 - protein, 261 aa, synthetic construct
MTALTDKLTQLKLDFMAKELDRVLTDAAAKSLSPSAALEWLTDLELEGRRGRSVERRFRLSKLQARHGIESFNFNHHKSRQQMKSKLLHLLDLDFIKQGTNIILIGNPGTGKTFLSKIIGWKACQTNLRVLFTPAMQMLNQLVASQADHSLVRRLKTYTDPTLLVCDELGYLSLDQQTSNLFYQVISTRHAERRSTVITTNTIFSEWGNILFNTTIAAAIADRLVENSEVFLMGGPTWRNPKNGQAAPQPEGVAARSGAAL

SEQ ID NO: 947 - protein, 234 aa, synthetic construct
MSLHLDQILTDSAAKNLSLAQTLETLIDRELESRHQRSIERRFKLSRLQSKPSIDSFHFNHHKSRLQLKTRILRLLDLDFLRNGTSVCIIGNPGVGKTYLARIVGWRACQANQRVLFTTAMDMLNHLLASQVDHSLIRKLKIYTEPSLLVVDELGYLSLDQQTSNLFYQVISTRHSHKRSTLITTNTAFSDWGNILYNTTIATAIADRLVENSEIFLLGGESLRKGNKSQPPTE

SEQ ID NO: 948 - protein, 234 aa, synthetic construct; identical to SEQ ID NO: 505

SEQ ID NO: 949 - protein, 235 aa, synthetic construct
MSRQLDQALADAAAQNRSFTETLESLADLELESRNHRAIERRFRSSRLQTQYSIDSFHFKHHKSRMELKNRVMRLLDLEFLNKGTSAIFIGNPGVGKTFLAKVIAWRACQANQRVLFTTAMDMLNQLSASQVDHSVIRKLKIYTEPTLLVCDELGYLALDQQTSNLFYQVISTRHSHKRSTIITTNTAFSEWGNILYNTTIATAIADRLVENSEIFLLGGDSLRKANKNPNQPAE

SEQ ID NO: 950 - protein, 250 aa, synthetic construct
MTPLTDKLTRLNLDFMARDLDRVVTDSATRSLSHAATLEWLADLELEGRQSRSVERRFRLSKLHTQHGIESFNFNHHKSRQHIKSKLLNLLDLDFIRQGTNIILIGNPGTGKTFLSKIIGWKACQANMRVLFAPAMQMLNQLVASQVDHSLMRKLKIFTDPALLVCDELGYLSLDQQTSNLFYQVISTRHAERRSTVITTNTIFSEWGNILFNTTIAAAIADRLVENSEVFLLGGPTCRNPKNGQTSPKE

SEQ ID NO: 951 - protein, 235 aa, synthetic construct
MSQKLEQTLKEAAAKNLSFAATLEALADLELEARNRRAVERRFHLSRLHAQPSIDTFHFQHHKSRMQSKSRILRLLDLNFLKDGTNVVLIGNPGTGKTYLAQILGWRACQANVRTLFTSAMDMLNHLLASQVDHSLVRKLRVYTEPTLLICDELGYLSLDQQTSNLFYQVISTRHSQHKSTVITTNTAFSEWGNILFNTTIATAIADRLVENSEIFLLGGESLRKAQKGQPPASA

SEQ ID NO: 952 - protein, 235 aa, synthetic construct
MSQKLEPTLKEAAAKNLSFAATLETLADIELEARNRRAVDRRFHLSRLHAQPSIDTFHFQHHKSRMQSKSRILRLLDLNFLKDGTNVVLIGNPGTGKTYLAQILGWRACQANVRTLFTSAMDMLNHLLASQVDHSLVRKLRVYTEPTLLLCDELGYLSLDQQTSNLFYQVISTRHSQHKSTVITTNTAFSEWGNILFNTTIATAIADRLVENSEIFLLGGESLRKAQKGQPPASA

SEQ ID NO: 953 - protein, 236 aa, synthetic construct
MTMAQKLGTMTQEAANQNLSFTAALERLADLELEARHGHAIERRFKFSRLPAQPTLDQFQFTHHKSRQQAKNRLLHLLDLDFLQQGTNVVIIGNPGVGKTFLAQILGWRACQANVRVLFTTAMEMLNHLLASQVDHSLVRKLKVYTEPTALIVDELGYLALDQQTSNLFYQVISTRHSRKRSSIITTNTPFSDWGNILYNTTIAAAIADRLVENSEIFLLGGESLRKAQKSPPPAA

SEQ ID NO: 954 - protein, 216 aa, synthetic construct
MSQKLEPTLKEAAAKNLSFAATLEALADLELEARNRRAVERRFHLSRLHAQPSIDTFHFQHHKSRIQSKSRILRLLDLNFLKDGTNVVLIGNPGTGKTYLAQILGWRACQANVRTLFTSAMDMLNHLLASQVDHSLVRKLRVYTEPTLLICDELGYLSLDQQTSNLFYQVISTRHSQHKSTVITTNTAFSEWGNILFNTTIATAIADRLVENSEIF

SEQ ID NO: 955 - protein, 249 aa, synthetic construct
MTLEEKLIQLRLMTMAQKLETLTQEAAKQNLSFAAALERLADLELEALHGHAIERRFKLSRLPAQPTLDQFHFAHHKSRQQVKNRLLHLLDLDFLQQGTNVVIIGNPGVGKTFLAQILGWRACQANVRVLFTTAMEMLNHLLASQVDHSLVRKLKVYTEPTALIVDELGYLALDQQTSNLFYQVISTRHSRKRSTIITTNTPFSDWGNILYNTTIAAAIADRLVENSEIFLLGGESLRKAQKSPPPAAV

SEQ ID NO: 956 - protein, 237 aa, synthetic construct
MTMAQKLETMTQEAADQNLSFAAALERLADLELEARHGHAIERRFKFSRLPAQPTLDQFQFTHHKTRQQAKNRLLHLLDLNFLQQGTNVVIIGNPGVGKTFLAQILGWRACQANVRVLFTTAMEMLNHLLASQVDHSLVRKLKVYTEPTALIVDELGYLALDQQTSNLFYQVISTRHSRKRSTIITTNTPFSDWGNILYNTTIAAAIADRLVENSEIFLLGGESLRKAQKSPPPAAA

SEQ ID NO: 957 - protein, 249 aa, synthetic construct
MTLEEKLTQLRLMTMAQKLETMTKEAANQNLSFTAALERLADLELEARHGHAIERRFKFSRLPAQPTLDQFQFTHHKTRQQAKSRLLHLLDLDFLQQGTNVVIIGNPGVGKTFLAQILGWRACQANVRVLFTTAMEMLNHLLASQVDHSLVRKLKVYTEPTALIVDELGYLALDQQTSNLFYQVISTRHSRKRSSIITTNTPFSDWGNILYNTTIAAAIADRLVENSEIFLLGGESLRKAQKSPPPAAA

SEQ ID NO: 958 - protein, 249 aa, synthetic construct
MTLEEKLTQLRLMTMAQKLEMMTKEAANQNLSFTAALERLADLELEARHGHAIERRFKFSRLPAQPTLDQFQFTHHKTRQQAKSRLLHLLDLDFLQQGTNVVIIGNPGVGKTFLAQILGWRACQANVRVLFTTAMEMLNHLLASQVDHSLVRKLKVYTEPTALIVDELGYLALDQQTSNLFYQVISTRHSRRRSTIITTNTPFSDWGNILYNTTIAAAIADRLVENSEIFLLGGESLRKAQKSPPPAAA

SEQ ID NO: 959 - protein, 250 aa, synthetic construct
MTALTDKLTQLKLDFMAKELDRVLTDAAAKSLSPSAALEWLADLELEGRQGRSVERRFRLSKLQARHGIESFNFNHHKSRQQMKSKILHLLDLDFIKQGTNIILIGNPGTGKTFLAKIIAWKACQANLRVLFMPAMQMLNQLVASQADHSLVRRLKTYTDPTILVCDELGYLSLDQQTSNLFYQVISTRHAERRSTVITTNTIFSEWGNILFNTTIAAAIADRLVENSEVFLMGGPTWRTPKNGQSAPQQ

SEQ ID NO: 960 - protein, 237 aa, synthetic construct
MTMAQKLETMTKEAANQNLSFAAALERLADLELEARHGHAIERRFKFSRLPAQPTLDQFQFAHHKSRQQAKNRLLHLLDLDFLQQGTNVVIIGNPGVGKTFLAQILGWRACQANVRVLFTTAMEMLNHLLASQVDHSLVRKLKVYTEPTALIVDELGYLALDQQTSNLFYQVISTRHSRKRSSIITTNTPFSDWGNILYNTTIAAAIADRLVENSEIFLLGGESLRKAQKSLPPATA

SEQ ID NO: 961 - protein, 249 aa, synthetic construct
MIPLEQKLLDLNLTVMSPHLETTLSEAAGKNLSAAATLEWLADMELEARRGRPIERRFKCSKLQTQPSIDAFHFSHHKSRSQNKNRVLRLLDLSFIANGTNLILIGNPGVGKTFLSKIVGWRACQSNQRVLFTTAMDMLNHLLASQVDHSLVRKLKAYTEPTLLICDELGYLALDQQSSNLFYQVISTRHSQKRSTVITTNTPFSDWGNILFNTTIATAIADRLVENSEIFLFGGDSLRKPKNPNPPAA

SEQ ID NO: 962 - protein, 249 aa, synthetic construct
MIPLEQKLLDLNLTVMSHRLETTLSEAAGKNLSAAATLEWLADMELEARHGRAIERRFKCSKLQAQPSIDAFHFSHHKSRSQNKNRVLRLLDLTFIANGTNLVLIGNPGVGKTFLSKIVGWRACQANQRVLFTTAMDMLNHLLASQVDHSLVRKLKAYTEPALLICDELGYLALDQQSSNLFYQVISTRHSQKRSTIITTNTAFSDWGNILFNTTIATAIADRLVENSEIFMFGGDSLRKPKNPNSPAE

SEQ ID NO: 963 - protein, 250 aa, synthetic construct
MTSLEQKLQQLNLAAMSHQIEQTIAEAAAKNMSVGATLEWLADLELEARTGRAIDRRFKSSRLQSRPSIDGFQFHHHKSRVQAKNRILRLLDLNFLREGTNLVLIGNPGVGKTFLAKVIGWKACQANQRVLFTTAMDMLNQLSASQVDHSLVRKLKGYTEPSLLICDELGYLALDQQTSNLFYQVISTRHSQKKSTVITTNTPFSDWGNILYNTTIATAIADRLVENSEIFLLGGDSLRKANKNSSSPEE

SEQ ID NO: 964 - protein, 249 aa, synthetic construct
MTVLQQKLDQLNLMTMSQQLEPTLTEATARNLSVAQTLEALVDRELEARSQRTVERRFKLSRLHAKPSIDSFQFNHHKSRLQLKNRILRLLDLDFIQNGTNLCVIGNPGVGKTFLAKIIGWRACQAKQRVLFTTAMDMLNHLLASQVDHSLVRKLKLYTDPTLLLVDELGYLSLDQQTSNLFYQVISTRHSCHRSTLITTNTAFSDWGNILYNTTIATAIADRLVENSEIFLLGGESLRKTNKSQPSSE

SEQ ID NO: 965 - protein, 250 aa, synthetic construct
MTELNDKLTQLKLDFMARELDRVVTDAAARSLSPVATLEWLADLELEGRQNRSVERRFRLSKLQAKQGIESFNFNHHKSRQQMKSKILHLLDLDFIKQGTNIVLIGNPGTGKTFLSKIIGWKACQANLRVLFTPAMQMLNQLVASQADHSLVRKLKIYTDPTLLVCDELGYLSLDQQTSNLFYQVISTRHAEHRSTVITTNTIFSEWGNILFNTTIAAAIADRLVENSEVFLLGGPTWRNPKNGQTAPPQ

SEQ ID NO: 966 - protein, 223 aa, synthetic construct
MTPLAEKLERLKLPVMSRQLDEALSDAAAKNWSTAQALERLADLELEDRNRRAVERRFRFSRLQVQYSIDAFHFNHHKSRLQNKTRILRLLDLDFIAQGTNLVLIGNPGTGKTFLAKVVGWRACQANYRVLFTTAMDMLNQLLASQADQSLVRKLRIYTDPTLLICDELGYLSLDQQTSNLFYQVISTRHSQRRSTIITTNTLCGAPHNKFNAESILMRSDRL

SEQ ID NO: 967 - protein, 250 aa, synthetic construct
MTPLEQKLEQLKLPTMSQKLEPTLKEAAAKNLSFVATLEALADLELEARNRRAVERRFQLSRLHAQPSIDTFHFQHHKSRMQSKSRILRLLDLNFLKDGTNVVLIGNPGTGKTYLAQILGWRACQANVRTLFTSAMDMLNHLLASQVDHSLVRKLRVYTEPTLLICDELGYLSLDQQTSNLFYQVISTRHSQHKSTVITTNTAFSEWGNILFNTTIATAIADRLVENSEIFLLGGESLRKAQKGQPPASA

SEQ ID NO: 968 - protein, 249 aa, synthetic construct
MTLEEKLTQLRLTTMAQKLETMTQEAANQNLSFAAALERLADLELEARHGHAIERRFKFSRLPAQPTLDQFHFAHHKSRQQAKNRLLHLLDLDFLQQGTNVVIIGNPGVGKTFLAQILGWRACQANVRVLFTTAMEMLNHLLASQVDHSLVRKLKVYTEPTALIVDELGYLALDQQTSNLFYQVISTRHSRKRSTIITTNTPFSDWGNILYNTTIAAAIADRLVENSEIFLLGGESLRKAQKSPPPAAA

SEQ ID NO: 969 - protein, 201 aa, synthetic construct
MTPLEQKLQQLNLKAMSRQAEATIADAAARNLSVSATLELLADMELEVRHSRAIERRFKCSRLQSQPSIDAFHFHHHKSRMQAKTRILRLLDLTFLKQGTNLVLIGNPGVGKTFLARVFGWKACQANQRVAFTTAMDMLNHLLASQVDHSLVRKLKTYTEPTLLIVDELGYLSLDQQTSNLFYQVISTRQSQKRSTIITTN

SEQ ID NO: 970-971 - skipped (2 entries)

SEQ ID NO: 972 - protein, 8 aa, synthetic construct
  VARIANT 3: note = Any naturally occurring amino acid
  VARIANT 4: note = W, F, or Y
  VARIANT 5: note = Any naturally occurring amino acid
  VARIANT 6: note = Any naturally occurring amino acid
KRXXXXAF

SEQ ID NO: 973 - skipped

SEQ ID NO: 974 - protein, 6 aa, synthetic construct
  VARIANT 5: note = K or R
  VARIANT 6: note = W, F, or Y
LGKRXX

SEQ ID NO: 975 - skipped

SEQ ID NO: 976 - protein, 20 aa, synthetic construct
  VARIANT 4: note = Any naturally occurring amino acid
  VARIANT 8: note = Any naturally occurring amino acid
  VARIANT 11: note = Any naturally occurring amino acid
  VARIANT 15: note = Any naturally occurring amino acid
  VARIANT 19: note = Any naturally occurring amino acid
GLFXALLXLLXSLWXLLLXA

SEQ ID NO: 977-982 - skipped (6 entries)

SEQ ID NO: 983 - protein, 16 aa, synthetic construct
APKKKRKVGIHGVPAA

SEQ ID NO: 984 - DNA, 30 bp, synthetic construct
  source 1..30: mol_type = other DNA
tattaaatactcgtattgctgttcgattat

SEQ ID NO: 985 - RNA, 37 nt, synthetic construct
  source 1..37: mol_type = other RNA
gtcgcgcgcgactccccgatgtgaaggggactgaaac

SEQ ID NO: 986 - RNA, 24 nt, synthetic construct
  source 1..24: mol_type = other RNA
gattgtaaagaacaacttggctat

SEQ ID NO: 987 - RNA, 20 nt, synthetic construct
  source 1..20: mol_type = other RNA
tgcttgcaaaaatggacgcg

SEQ ID NO: 988 - RNA, 29 nt, synthetic construct
  source 1..29: mol_type = other RNA
cggatcatccccgcgcgggcggggaacac

SEQ ID NO: 989 - RNA, 28 nt, synthetic construct
  source 1..28: mol_type = other RNA
gtccgccccgcgcatgcggggatcgacc

SEQ ID NO: 990 - RNA, 28 nt, synthetic construct
  source 1..28: mol_type = other RNA
ggttcctccgcgtgcgcggagatagacc

SEQ ID NO: 991 - RNA, 28 nt, synthetic construct
  source 1..28: mol_type = other RNA
ggcttcatccccgctgagcggggccacc

SEQ ID NO: 992 - RNA, 29 nt, synthetic construct
  source 1..29: mol_type = other RNA
cggttcatccccgcgcacgcggggaacac

SEQ ID NO: 993 - RNA, 37 nt, synthetic construct
  source 1..37: mol_type = other RNA
gactgaatcacagacctgaataagaagggattaagac

SEQ ID NO: 994 - RNA, 31 nt, synthetic construct
  source 1..31: mol_type = other RNA
tgcgttacaagatctcttaacggttcaacat

SEQ ID NO: 995 - RNA, 36 nt, synthetic construct
  source 1..36: mol_type = other RNA
gcttcaatggggccgcgctttcggaagcgcggaaac

SEQ ID NO: 996 - RNA, 34 nt, synthetic construct
  source 1..34: mol_type = other RNA
aatttcaatccacgccccccgcgaggggagcgac

SEQ ID NO: 997 - RNA, 32 nt, synthetic construct
  source 1..32: mol_type = other RNA
gtcgctccccgcgtgggggcgtggattgaaac

SEQ ID NO: 998 - RNA, 29 nt, synthetic construct
  source 1..29: mol_type = other RNA
gttttccccacacgcgtgggggtggaccg

SEQ ID NO: 999 - RNA, 29 nt, synthetic construct
  source 1..29: mol_type = other RNA
gttttccccgcgagtgcgggggtgaggcg

SEQ ID NO: 1000 - RNA, 29 nt, synthetic construct
  source 1..29: mol_type = other RNA
atcgtccccacgggcgtgggggtgaaccg

SEQ ID NO: 1001 - RNA, 37 nt, synthetic construct
  source 1..37: mol_type = other RNA
gtttcaaccctcacccaacctcaaggccgggtgcaac

SEQ ID NO: 1002 - RNA, 37 nt, synthetic construct
  source 1..37: mol_type = other RNA
gtttcaatctcaaccgagatgccaggcccctggcgac

SEQ ID NO: 1003 - RNA, 36 nt, synthetic construct
  source 1..36: mol_type = other RNA
tttcaatctctgctgagcttccctgaccacatagac

SEQ ID NO: 1004 - RNA, 37 nt, synthetic construct
  source 1..37: mol_type = other RNA
gtttcaatctcagacgagatgccaggccgcttgagcc

SEQ ID NO: 1005 - RNA, 37 nt, synthetic construct
  source 1..37: mol_type = other RNA
gtttcaattctcaatgcccccgagaaggcattgctac

SEQ ID NO: 1006 - RNA, 21 nt, synthetic construct
  source 1..21: mol_type = other RNA
tttccggagcatacccgttca

SEQ ID NO: 1007 - RNA, 29 nt, synthetic construct
  source 1..29: mol_type = other RNA
atttcaattctacttagttctattaatac

SEQ ID NO: 1008 - RNA, 36 nt, synthetic construct
  source 1..36: mol_type = other RNA
gttgtatcttatcaaacatctacatcaaaccacaac

SEQ ID NO: 1009 - protein, 6 aa, synthetic construct
HHHHHH

SEQ ID NO: 1010 - protein, 5 aa, synthetic construct
GSGGS

SEQ ID NO: 1011 - protein, 6 aa, synthetic construct
GGSGGS

SEQ ID NO: 1012 - protein, 4 aa, synthetic construct
GGGS

SEQ ID NO: 1013 - protein, 4 aa, synthetic construct
GGSG

SEQ ID NO: 1014 - protein, 5 aa, synthetic construct
GGSGG

SEQ ID NO: 1015 - protein, 5 aa, synthetic construct
GSGSG

SEQ ID NO: 1016 - protein, 5 aa, synthetic construct
GSGGG

SEQ ID NO: 1017 - protein, 5 aa, synthetic construct
GGGSG

SEQ ID NO: 1018 - protein, 5 aa, synthetic construct
GSSSG

SEQ ID NO: 1019 - DNA, 20 bp, synthetic construct
  source 1..20: mol_type = other DNA
  misc_difference 1..20: note = This sequence may encompass 5-20 nucleotides
aaaaaaaaaaaaaaaaaaaa

SEQ ID NO: 1020 - DNA, 20 bp, synthetic construct
  source 1..20: mol_type = other DNA
  misc_difference 1..20: note = This sequence may encompass 5-20 nucleotides
tttttttttttttttttttt

SEQ ID NO: 1021 - DNA, 20 bp, synthetic construct
  source 1..20: mol_type = other DNA
  misc_difference 1..20: note = This sequence may encompass 5-20 nucleotides
cccccccccccccccccccc

SEQ ID NO: 1022 - DNA, 20 bp, synthetic construct
  source 1..20: mol_type = other DNA
  misc_difference 1..20: note = This sequence may encompass 5-20 nucleotides
gggggggggggggggggggg
